(19) United States
(12) Patent Application Publication
(10) Pub. No.: US 2026/0115275 A1
(43) Pub. Date: Apr. 30, 2026

(54) RIBOZYME-ACTIVATED RNA CONSTRUCTS AND USES THEREOF

(71) Applicant: The Regents of the University of California, Oakland, CA (US)

(72) Inventors: Prashant Mali, La Jolla, CA (US); Andrew Portell, La Jolla, CA (US); Amir Dailamy, La Jolla, CA (US); Aditya Kumar, La Jolla, CA (US)

(21) Appl. No.: 18/271,832

(22) PCT Filed: Jan. 11, 2022
(86) PCT No.: PCT/US2022/012004

§ 371 Date: Jul. 11, 2023

Related U.S. Application Data
(60) Provisional application No. 63/136,201, filed on Jan. 11, 2021.

(51) Int. Cl. A61K 39/215; A61K 31/7105; A61K 39/00; A61K 39/155; C12N 9/00; C12N 15/113

(52) U.S. Cl. CPC A61K 39/215; A61K 31/7105; A61K 39/155; C12N 9/93; C12N 15/113; C12Y 605/01003; A61K 2039/53; A61K 2039/60; C12N 2310/121; C12N 2750/14111; C12N 2800/10; C12N 2840/203

(57) ABSTRACT

The disclosure provides for ribozyme-mediated fusion constructs and systems and methods thereof, for use in a variety of applications, including for inducible gene expression systems, gene therapy, and combinatorial screening.

### CROSS REFERENCE TO RELATED APPLICATIONS

[0001] This application is a U.S. National Phase application filed under 35 U.S.C. § 371 and claims priority to International Application No. PCT/US2022/012004, filed Jan. 11, 2022, which application claims priority under 35 U.S.C. § 119 from Provisional Application Ser. No. 63/136,201, filed Jan. 11, 2021, the disclosures of which are incorporated herein by reference.

### STATEMENT OF GOVERNMENT SUPPORT

[0002] This invention was made with Government support under Grant Nos. R01GM123313, R01CA222826, and R01HG009285, awarded by the National Institutes of Health. The Government has certain rights in the invention.

### SEQUENCE LISTING

[0003] The instant application contains a Sequence Listing which has been submitted electronically in ASCII format and is hereby incorporated by reference in its entirety. Said ASCII copy, created on Feb. 16, 2022, is named 00015-396WO1_SL.txt and is 633,808 bytes in size.

### TECHNICAL FIELD

[0004] The disclosure provides for ribozyme-mediated fusion constructs and systems and methods thereof, for use in a variety of applications, including for inducible gene expression systems, gene therapy, and combinatorial screening.

### BACKGROUND

[0005] Ribozymes (ribonucleic acid enzymes) are RNA molecules that have the ability to catalyze specific biochemical reactions, including CRNA splicing in gene expression, similar to the action of protein enzymes. Ribozymes participate in a variety of RNA processing reactions, including RNA splicing, viral replication, and transfer RNA biosynthesis. Examples of ribozymes include the hammerhead ribozyme, the VS ribozyme, Leadzyme and the hairpin ribozyme. Ribozymes have been proposed and developed for the treatment of disease through gene therapy.

### SUMMARY

[0006] The disclosure provides for innovative engineering of endogenous RNA processing machinery to create linked RNA fusion constructs which can be utilized for RNA-based readouts for combinatorial genetic interaction screens as well as inducible gene expression. As shown in the examples herein, separately transcribed sequences with complementarity to one another are fused to self-cleaving ribozymes. Once transcribed, the auto-catalytic activity of the ribozymes cleaves the transcripts to create unique ends. Due to the complementary region, the two transcripts will then hybridize, juxtaposing the cleaved ends which can then be recognized by endogenous RNA ligases to create a linked fusion construct. It is further demonstrated herein the applicability of this approach to link two transcripts delivered to cells on disparate library elements. When linked to intronic sequences, the ribozyme-mediated RNA-fusion constructs can be utilized for controllable expression of full-length gene products. The fusion of RNAs (including for circularization) had additional utility in transcriptome and genome engineering modalities, such as RNAi, ASOs, ADAR-recruiting guide RNAs, and guide RNAs in CRISPR-Cas.

[0007] The disclosure provides a ribozyme activated RNA-construct(s) comprising one or more ribozymes; and one or more RNA coding sequences for at least one polypeptide of interest, wherein the transcription of the one or more RNA coding sequences for at least one polypeptide of interest is activated by or dependent upon the activity of the one or more ribozymes. In one embodiment, the ribozyme activated RNA-construct further comprises a first engineered RNA element comprising an optional primer region, an optional barcode region, an RNA coding sequence for a polypeptide of interest and a complementary sequence to a sequence of a second engineered RNA element, and a first self-cleaving ribozyme; a second engineered RNA element comprising an optional primer region, an optional barcode region, an RNA coding sequence for a polypeptide of interest and a complementary sequence to a sequence of the first engineered RNA element, and a second self-cleaving ribozyme; wherein cleavage of the first and second engineered RNA elements by the first and second self-cleaving ribozymes, respectively, provides for a hybridization construct that comprises a region of dsRNA from the commentary sequences being hybridized together, wherein the hybridization construct can be further ligated by an RNA ligase to form an RNA-fusion construct, and wherein expression from the RNA-fusion construct produces the at least one polypeptide of interest. In a further embodiment, the first engineered RNA element comprises a barcode sequence or a unique molecular identity (UMI) sequence and/or wherein the second engineered RNA element comprises a barcode sequence or a UMI sequence. In still a further embodiment, the barcode sequence or the UMI sequence of the first engineered element has a different sequence than the barcode region or the UMI sequence from the second engineered RNA element. In another embodiment, the first engineered RNA element comprises a primer sequence, and/or wherein the second engineered RNA element comprises a primer sequence. In a further embodiment, the primer sequence of the first engineered RNA element is different from the primer sequence from the second engineered RNA element. In another embodiment, the first and second complementary sequences are from 30 to 60 bp in length. In a further embodiment, the first and second complementary sequence are from 40 to 50 bp in length. In another embodiment, the first and second ribozymes are Twister ribozymes. In a further embodiment, the first ribozyme is a P3 Twister ribozyme. In still a further embodiment, the second ribozyme is a P1 Twister ribozyme. In another embodiment, the RNA ligase is RtcB. In another or further embodiment of any of the foregoing embodiments, a vector or plasmid comprises the first engineered element, wherein the first engineered element is located downstream of a first RNA promoter and a first perturbation element; and/or wherein a vector or plasmid comprises the second engineered element, wherein the second engineered element is located downstream of a second RNA promoter and a second perturbation element. In a further embodiment, the first RNA promoter and/or the second RNA promoter is a polymerase III promoter. In yet a further embodiment, the polymerase III promoter is a hU6 promoter. In another embodiment, the first perturbation element and/or the second perturbation element is a sgRNA utilized in a CRISPR knockout screen. In another embodiment, a first engineered RNA element comprising an RNA coding sequence for a polypeptide of interest, an intron sequence, a complementary sequence to a sequence of a second engineered RNA element and a 3′ aptamer, and a first self-cleaving ribozyme, and wherein the 3′ aptamer interacts with a first self-cleaving ribozyme to stabilize it; a second engineered RNA element comprising an RNA coding sequence for a polypeptide of interest, an intron sequence, a complementary sequence to a sequence of the first engineered RNA element, and a 3′ aptamer, wherein the second engineered RNA template is tethered to a second self-cleaving ribozyme, and wherein the 3′ aptamer interacts with a second self-cleaving ribozyme to stabilize it; wherein cleavage of the first and second engineered RNA elements by the first and second self-cleaving ribozymes, respectively, provides for a hybridization construct that comprises a region of dsRNA from the commentary sequences being hybridized together, and wherein the hybridization construct can be further ligated by an RNA ligase and the intron sequences removed by a spliceosome to form an RNA-fusion construct, wherein expression from the RNA-fusion construct produces the at least one polypeptide of interest. In a further embodiment, the intron sequence is derived from dihydrofolate reductase. In another embodiment, the RNA coding sequences for a polypeptide of interest are adjacent to each of the intron sequences. In another embodiment, the RNA coding sequences for a polypeptide of interest encode a polypeptide/protein selected from insulin, clotting factor IX, the cystic fibrosis transmembrane conductance regulator protein, and the dystrophin protein. In another embodiment, the ribozyme activated RNA-construct(s) comprises one or more promoter sequences; one or more RNA coding sequences for at least one polypeptide of interest; one or more ribozymes, wherein the one or more ribozymes are aptazyme-based riboswitches; a 3′ UTR sequence comprising the aptazyme-based riboswitches; and a poly(A) sequence; wherein the aptazyme-based riboswitches when not bound to target ligands destabilize the ribozyme activated RNA-construct(s) leading to decreased expression of the at least polypeptide of interest, and wherein the aptazyme-based riboswitches when bound to target ligands stabilize the ribozyme activated RNA-construct(s) leading to increased expression of the at least polypeptide of interest. In another embodiment, the aptazyme-based riboswitches are hammerhead aptazymes. In still another embodiment, the target ligands are selected from tetracycline, theophylline, and guanine. In another embodiment, the at least one polypeptide of interest is selected from the group consisting of a prodrug activating enzyme, a biological response modifier, a receptor ligand, an immunoglobulin derived binding polypeptide, a non-immunoglobulin binding polypeptide, an antigenic polypeptide, a genome editing enzyme, and any combination thereof wherein multiple polypeptides are separated by a 2A or 2A-like peptide. In a further embodiment, the biological response modifier or an immunopotentiating cytokine. In yet a further embodiment, the immunopotentiating cytokine is selected from the group consisting of interleukins 1 through 38, interferon, tumor necrosis factor (TNF), and granulocyte-macrophage-colony stimulating factor (GM-CSF). In another embodiment, the 2A- or 2A-like peptide further comprises a GSG linker moiety. In yet another embodiment, the genome editing enzyme is selected from the group consisting of a zinc finger nuclease, a transcription activator-like effector nuclease (TALEN), an engineered meganuclease and an RNA-guided DNA endonuclease (Cas) polypeptide. In still another embodiment, the one or more promoter sequences are polymerase II (pol-II) promoter sequences. In another embodiment, the one or more promoter sequences have a sequence(s) for EF1α, hU6, SV40, CMV, a RSV, NEUROD2 and/or TBX20. In another embodiment, the poly(A) sequence is a bGH poly(A) sequence.

[0008] The disclosure also provides a pharmaceutical composition comprising the ribozyme activated RNA-construct(s) as described above, wherein the ribozyme activated RNA-construct(s) is linearized and comprises a 5′ ribozyme; a 5′ ligation sequence; an internal ribosome entry site (IRES) sequence; an RNA coding sequence for at least one polypeptide of interest; a 3′ ligation sequence; and a 3′ ribozyme sequence, and a pharmaceutically acceptable carrier. In a further embodiment, the linear ribozyme activated RNA-construct(s) lacks a polymerase binding region. In still another embodiment, the 5′ and 3′ ribozymes are selected from the group consisting of a twister ribozyme, a hammerhead ribozyme, a hatchet ribozyme, a hepatitis delta virus ribozyme, a ligase ribozyme, a pistol ribozyme, a twister sister ribozyme, a Vg1 ribozyme, a VS ribozyme and derivatives of any of the foregoing. In another embodiment, the 5′ and 3′ ligation sequences are substrates of naturally occurring ligases in situ. In a further embodiment, the naturally occurring ligase is RtcB. In another embodiment, the IRES comprises a sequence of any one of the sequences of SEQ ID NO: 1-1328 and sequences thereof wherein T is U. In another embodiment, the at least one polypeptide of interest comprises two or more polypeptides of interest separated by a self-cleaving peptide. In still a further embodiment, the self-cleaving peptide comprises a 2A- or 2A-like-peptide. In another embodiment, the at least one polypeptide of interest is selected from the group consisting of a prodrug activating enzyme, a biological response modifier, a receptor ligand, an immunoglobulin derived binding polypeptide, a non-immunoglobulin binding polypeptide, an antigenic polypeptide, a genome editing enzyme, and any combination thereof wherein multiple polypeptides are separated by a 2A or 2A-like peptide. In yet another embodiment, the biological response modifier or an immunopotentiating cytokine. In a further embodiment, the immunopotentiating cytokine is selected from the group consisting of interleukins 1 through 38, interferon, tumor necrosis factor (TNF), and granulocyte-macrophage-colony stimulating factor (GM-CSF). In another embodiment, the 2A- or 2A-like peptide further comprises a GSG linker moiety. In yet another embodiment, the genome editing enzyme is selected from the group consisting of a zinc finger nuclease, a transcription activator-like effector nuclease (TALEN), an engineered meganuclease and an RNA-guided DNA endonuclease (Cas) polypeptide. In still another embodiment, the 5′ and 3′ ribozyme sequences are independently selected from a sequence that is at least 85-100% identical to 5′-GCCATCAGTCGCCGGTCCCAAGCCCGGATAAAATGGGAGGGGGCGGGAAACCGCCT-3′ (SEQ ID NO: 1354) or 5′-AACACTGCCAATGCCGGTCCCAAGCCCGGATAAAAGTGGAGGGTACAGTCCACGC-3′ (SEQ ID NO: 1355) and either of the foregoing sequences wherein T is U. In another embodiment, the 5′ and 3′ ligation sequences are independently selected from a sequence that is at least 85-100% identical to 5′-AACCATGCCGACTGATGGCAG-3′ (SEQ ID NO: 1356) or 5′-CTGCCATCAGTCGGCGTGGACTGTAG-3′ (SEQ ID NO: 1357) and either of the foregoing wherein T is U. In another embodiment, the IRES sequence is at least 85-100% identical to 5′-gcggccgcgtcgacgggcccgcggaattccgccccccccccctctccctcccccccccctaacgttac tggccgaagccgcttggaataaggccggtgtgcgtttgtctatatgttattttccaccatattgccgt cttttggcaatgtgagggcccggaaacctggccctgtcttcttgacgagcattcctaggggtctttcc cctctcgccaaaggaatgcaaggtctgttgaatgtcgtgaaggaagcagttcctctggaagcttcttg aagacaaacaacgtctgtagcgaccctttgcaggcagcggaaccccccacctggcgacaggtgcctct gcggccaaaagccacgtgtataagatacacctgcaaaggcggcacaaccccagtgccacgttgtgagt tggatagttgtggaaagagtcaaatggctctcctcaagcgtattcaacaaggggctgaaggatgccca gaaggtaccccattgtatgggatctgatctggggcctcggtgcacatgctttacatgtgtttagtcga ggttaaaaaaacgtctaggccccccgaaccacggggacgtggttttcctttgaaaaacacgatgataa tatggccacaacc-3′ (SEQ ID NO: 1358) and a sequence of the foregoing wherein T is U.

[0009] The disclosure also provides a vaccine composition comprising the ribozyme activated RNA-construct(s) of the disclosure, wherein the ribozyme activated RNA-construct(s) is linearized and comprises a 5′ ribozyme; a 5′ ligation sequence; an internal ribosome entry site (IRES) sequence; an RNA coding sequence for at least one antigenic polypeptide; a 3′ ligation sequence; and a 3′ ribozyme sequence, and a pharmaceutically acceptable carrier. In a further embodiment, the linearized ribozyme activated RNA-construct(s) lacks a polymerase binding region. In another embodiment, the 5′ and 3′ ribozyme is selected from the group consisting of a twister ribozyme, a hammerhead ribozyme, a hatchet ribozyme, a hepatitis delta virus ribozyme, a ligase ribozyme, a pistol ribozyme, a twister sister ribozyme, a Vg1 ribozyme, a VS ribozyme and derivatives of any of the foregoing. In another embodiment, the 5′ and 3′ ligation sequences are substrates of naturally occurring ligases in situ. In a further embodiment, the naturally occurring ligase is RtcB. In another embodiment, the IRES comprises any one of the sequences of SEQ ID NO: 1-1328 and sequences thereof wherein T is U. In another embodiment, the at least one antigenic polypeptide comprises two or more antigenic polypeptides separated by a self-cleaving peptide. In a further embodiment, the self-cleaving peptide comprises a 2A- or 2A-like-peptide. In a further embodiment, the 2A- or 2A-like peptide further comprises a GSG linker moiety. In still another embodiment, the 5′ and 3′ ribozyme sequences are independently selected from a sequence that is at least 85-100% identical to 5′-GCCATCAGTCGCCGGTCCCAAGCCCGGATAAAATGGGAGGGGGCGGGAAACCGCCT-3′ (SEQ ID NO: 1354) or 5′-AACACTGCCAATGCCGGTCCCAAGCCCGGATAAAAGTGGAGGGTACAGTCCACGC-3′ (SEQ ID NO: 1355) and sequences of either of the foregoing wherein T is U. In another embodiment, the 5′ and 3′ ligation sequences are independently selected from a sequence that is at least 85-100% identical to 5′-AACCATGCCGACTGATGGCAG-3′ (SEQ ID NO: 1356) or 5′-CTGCCATCAGTCGGCGTGGACTGTAG-3′ (SEQ ID NO: 1357) and sequences of either of the foregoing wherein T is U. In another embodiment, the IRES sequence is at least 85-100% identical to 5′-gcggccgcgtcgacgggcccgcggaattccgccccccccccctctccctcccccccccctaacgttac tggccgaagccgcttggaataaggccggtgtgcgtttgtctatatgttattttccaccatattgccgt cttttggcaatgtgagggcccggaaacctggccctgtcttcttgacgagcattcctaggggtctttcc cctctcgccaaaggaatgcaaggtctgttgaatgtcgtgaaggaagcagttcctctggaagcttcttg aagacaaacaacgtctgtagcgaccctttgcaggcagcggaaccccccacctggcgacaggtgcctct gcggccaaaagccacgtgtataagatacacctgcaaaggcggcacaaccccagtgccacgttgtgagt tggatagttgtggaaagagtcaaatggctctcctcaagcgtattcaacaaggggctgaaggatgccca gaaggtaccccattgtatgggatctgatctggggcctcggtgcacatgctttacatgtgtttagtcga ggttaaaaaaacgtctaggccccccgaaccacggggacgtggttttcctttgaaaaacacgatgataa tatggccacaacc-3′ (SEQ ID NO: 1358) and sequences of the foregoing wherein T is U. In another embodiment, the antigenic polypeptide comprises a SARS-COV-2 spike protein. In another embodiment, the at least one polypeptide of interest or antigenic polypeptide is contained within a self-amplifying RNA construct. In a further embodiment, the self-amplifying RNA construct comprises an alphavirus or a Paramyxovirus.

[0010] The disclosure also provides a plasmid or capsid comprising the ribozyme activated RNA-construct(s) of the disclosure. In one embodiment, the plasmid or capsid is an AAV-based plasmid or capsid. In another embodiment, the plasmid expresses a Cas9 protein and a gRNA.

[0011] The disclosure also provides a combinatorial screen comprising the ribozyme activated RNA-construct(s) of any of the foregoing embodiments.

[0012] In a particular embodiment, the disclosure provides a ribozyme-mediated RNA-fusion construct or system comprising: a first engineered RNA element comprising a primer region, a barcode region, and a complementary sequence to a sequence of a second engineered RNA element, wherein the first engineered RNA template is tethered to a first self-cleaving ribozyme; a second engineered RNA element comprising a primer region, a barcode region, and a complementary sequence to a sequence of the first engineered RNA element, wherein the second engineered RNA template is tethered to a second self-cleaving ribozyme; wherein cleavage of the first and second engineered RNA elements by the first and second self-cleaving ribozymes, respectively, provides for a hybridization construct that comprises a region of dsRNA from the commentary sequences being hybridized together, and wherein the hybridization construct can be further ligated by an RNA ligase to form an RNA-fusion construct. In a further embodiment, the first engineered RNA element comprises a barcode region that has a different sequence than the barcode region from the second engineered RNA element. In yet a further embodiment, the first engineered RNA element comprises a primer region that has a different sequence than the primer region from the second engineered RNA element. In another embodiment, the first and second complementary sequence are from 30 to 60 bp in length. In yet another embodiment, the first and second complementary sequence are from 40 to 50 bp in length. In a further embodiment, the first and second ribozymes are Twister ribozymes. In yet a further embodiment, the first ribozyme is a P3 Twister ribozyme. In another embodiment, the second ribozyme is a P1 Twister ribozyme. In a further embodiment, the RNA ligase is RtcB.

[0013] In another embodiment, the disclosure also provides a vector or plasmid comprising a first engineered element of described herein, wherein the first engineered element is located downstream of a first RNA promoter and a first perturbation element. In yet another embodiment, the disclosure also provides a vector or plasmid, comprising the second engineered element described herein, wherein the second engineered element is located downstream of a second RNA promoter and a second perturbation element. In a further embodiment, the first RNA promoter and/or the second RNA promoter is a polymerase III promoter. In yet a further embodiment, the polymerase III promoter is hU6 promoters. In a certain embodiment, the first perturbation element and/or the second perturbation element is a sgRNA utilized in a CRISPR knockout screen.

[0014] In a particular embodiment, the disclosure further provides for a combinatorial screen comprising the vector or plasmid described herein.

[0015] In a certain embodiment, the disclosure provides an inducible ribozyme-mediated RNA-fusion construct or system comprising: a first engineered RNA element comprising an intron sequence, a complementary sequence to a sequence of a second engineered RNA element and a 3′ aptamer, wherein the first engineered RNA template is tethered to a first self-cleaving ribozyme, and wherein the 3′ aptamer interacts with a first self-cleaving ribozyme to stabilize it; a second engineered RNA element comprising an intron sequence, a complementary sequence to a sequence of the first engineered RNA element, and a 3′ aptamer, wherein the second engineered RNA template is tethered to a second self-cleaving ribozyme, and wherein the 3′ aptamer interacts with a second self-cleaving ribozyme to stabilize it; wherein cleavage of the first and second engineered RNA elements by the first and second self-cleaving ribozymes, respectively, provides for a hybridization construct that comprises a region of dsRNA from the commentary sequences being hybridized together, and wherein the hybridization construct can be further ligated by an RNA ligase to form an RNA-fusion construct. In a further embodiment, the intron sequence is derived from dihydrofolate reductase. In yet a further embodiment, portions of therapeutic genes or proteins are fused to each of the intron sequences. In another embodiment, the therapeutic genes or proteins are selected from the human insulin gene, clotting factor IX, the cystic fibrosis transmembrane conductance regulator protein, and the dystrophin protein.

### DESCRIPTION OF DRAWINGS

[0016] FIG. 1A-C provides the results from preliminary studies. (A) Schematic illustrating the fusion of disparate barcodes at the RNA level. (B) Gel electrophoresis image following RT-PCR of plasmid transfection of fragL and fragR either alone or in combination. (C) Sanger sequencing trace of purified PCR product (SEQ ID NO: 1359) shown in panel B compared to the expected fusion (SEQ ID NO: 1347).

[0017] FIG. 2A-E provides (A) schematic illustrating the plasmid design for a combinatorial screen in which the ribozyme, complementary linker, barcode and primer of the ribozyme-mediated RNA-fusion construct are cloned downstream of a perturbation such as an sgRNA utilized in a CRISPR knockout screen. (B) Gel electrophoresis of an RT-PCR following plasmid transfection of HEK293T cells with the sgRNA fragL and sgRNA fragR constructs alone or in combination. (D) Gel electrophoresis of an RT-PCR following plasmid transfection of HEK 293T cells with the antisense fragL and antisense fragR constructs alone or in combination (SEQ ID NO: 1348). (C and E) Sanger sequencing trace of the purified PCXR product from the antisense-oriented RNA fusion (SEQ ID NO: 1349). FIG. 2 discloses SEQ ID NOS 1348, 1348-1349, and 1360, respectively, in order of appearance.

[0018] FIG. 3 provides a schematic illustrating the ribozyme-mediated RNA fusion approach for inducible gene expression. A therapeutic payload is split between two constructs. The fragL construct contains the N-terminus of the protein fused to an intronic sequence, a complementary region, a self-cleaving ribozyme, a complementary region, an intronic sequence, and the C-terminus of the therapeutic protein. Upon addition of an aptamer-binding ligand, the tertiary interactions between the aptamer and ribozyme are disrupted, allowing for autocatalytic cleavage of the transcript. The complementary regions hybridize to one another and the generated ends are ligated together by the endogenous RNA-ligase, RtcB. With the intronic sequences juxtaposed to one another, the cellular splicing machinery can recognize the splice sites and create a full-length functional protein.

[0019] FIG. 4 presents a schematic of RNA fusion from PolII promoters. Two constructs are cloned into the px600 AAV backbone which contains two halves of green fluorescent protein (GFP). Each GFP is linked to a DHFR intron and contains the RNA fusion linker (45 bp complementary region) as well as either the P3 (GFP-L) or P1 (GFP-R) Twister Ribozyme. Upon transcription, the ribozymes undergo self-cleavage to generate 5′ hydroxyl and 2′,3′-cyclic phosphate ends. The complementary linker regions will then hybridize, be ligated by RtcB, bringing the intronic sequences near one another. The endogenous spliceosome machinery will then spice out the introns to generate a fluorescent GFP molecule.

[0020] FIG. 5A-C presents (A) fluorescent images taken 48 hours after transfection of HEK293FT cells with the plasmids containing the RNA fusion machinery linked to one half of GFP (GFP-Left or GFP-Right) and an intronic sequences that are recognized by the spliceosome. (B) RNA was isolated from the HEK293FT cells shown in panel A and RT-PCR was performed using primers on both halves of the GFP transcript. (C) The PCR product was purified and Sanger sequenced (SEQ ID NO: 1350) to confirm the proper ligation of the full-length protein. FIG. 5C discloses SEQ ID NOS 1350 and 1350, respectively, in order of appearance.

[0021] FIG. 6A-E presents (A) fluorescent images taken 48 hours after transfection of HEK293FT cells with the plasmids containing the RNA fusion machinery linked to one half of GFP (GFP-Left or GFP-Right) and different intronic sequences. (B) Flow cytometry was run on transfected cells after 48 hours and the percent of GFP+ cells was quantified. (C) RT-qPCR relative expression of GFP with the DHFR intron after 48 hours. (D) RT-qPCR relative expression of GFP with the pCI constructs after 48 hours. (E) The activation ratio was calculated from qPCR comparing the relative GFP expression levels when the complementary sequence was present.

[0022] FIG. 7 provides the results of cells isolated 48 hours after transfection and analyzed via flow cytometry. Shown is the percentage of GFP+ cells from the total cells present.

[0023] FIG. 8A-B shows (A) schematic of a plasmid design for the ribozyme-mediated RNA barcode fusion constructs driven by the polymerase-II and polymerase-III-like H1 promoter; (B) Relative expression, as determined by quantitative RT-PCR (qRT-PCR) of the RNA fusion construct (normalized to GAPDH) for cells transfected with either a negative control (lentiCRISPRv2 plasmid backbone) or both the fragL and fragR constructs driven by a U6- or H1-promoter.

[0024] FIG. 9A-B provides (A) schematic illustrating the design for ribozyme-mediated circularized RNA barcodes. The 3′ end of the fragL construct is modified with a ‘designer exon’ and an intron, while the 5′ end of the fragR construct is mediated with an intron followed by a “designer exon’. Once transcribed, the ribozymes will self-cleave, the complementary sequences will hybridize, which juxtaposes the designer exons and introns with one another. This will then be recognized by the splicesome and a back-spicing reaction will take place, splicing out the introns and joining the exons for a fully circularized construct; (B) agarose gel image from an RT-PCR assay utilizing the primer pairs illustrated in panel (A) on cells transfected with the circ-fragL and circ-fragR constructs.

[0025] FIG. 10 sequences of the designer exon with the exon splicing enhancer (ESE) elements labeled, sequences of the intron sequences used with the fragL and fragR constructs with important features highlighted (SEQ ID Nos: 1351-1353).

[0026] FIG. 11A-B shows (A) a schematic illustrating the plasmid design for the dual-promoter system in which the GFP-pCI-L construct is driven by the U6 promoter while the GFP-pCI-R construct is driven by the CMV promoter; and (B) Relative expression of the GFP RNA transcript as determined by qRT-PCT. The fold activation between the full length and the link free construct without the ribozyme and complementary sequence is show above the two graphs.

[0027] FIG. 12A-C shows (A) a schematic illustrating the mechanism of inducible gene expression using a tetracycline-responsive hammerhead aptazyme embedded into the 3′ UTR of the gene of interest (GOI); (B) Insulin ELISA absorbance values from cell culture supernatant collected 48 hours after transfection with DMEM (−) or tetracycline (+) added 4-6 hours after transfection; and (C) Insulin ELISA absorbance values form cell culture supernatant collected 48 hours after transfection. Increasing concentrations of tetracycline were added 4-6 hours after transfection.

[0028] FIG. 13A-B shows (A) a schematic of the various ribozyme positions which have been assessed for their effect on gene expression induction; and (B) cell culture supernatant insulin ELISA levels for the plasmid design shows in panel (A) 48 hours after transfection in HEK293T cells.

[0029] FIG. 14A-E shows (A) a schematic of the plasmid design for the ribozyme mediated inducible SaCas9 construct; (B) SaCas9 mRNA levels as measured by quantitative PCR 48 hours after transfection in HEK293T cells; (C) timeline of experiment performed to assess tetracycline-induced Cas9 mediated editing of the Pcsk9 gene. Arrows denote the timepoints in which blood was collected (B), tetracycline was administered (T) on 3 consecutive days, or where the livers were harvested (H); (D) PCSK9 serum levels measured at various timepoints following AAV8 administration; and (E) editing rate measured in the livers of mice injected with AAV8-SaCas9-Ribo constructs at the 5-week and 7-week timepoints.

[0030] FIG. 15 schematically shows an in vitro transcribed RNA delivery system wherein a linear RNA construct is circularized in situ. In this embodiment, in vitro linear RNA is generated, the linear RNA is delivered into cells, and in situ it circularizes. In some embodiments, only in situ does it circularize.

[0031] FIG. 16A-D provide (A) a general template for engineering circular RNA (SEQ ID NO: 1329) wherein the payload is provided as GFP but can be any polypeptide of interest; (B) a schematic of the circularized RNA construct and resulting GFP expression comparing linear and circular constructs on Day 1, 2 and 3; (C) micrographs of fluorescent expression and expression; and (D) relative GFP RNA expression over time.

[0032] FIG. 17A-C provides (A) schematic of a circular format containing exemplary payloads of CRISPR/ZF/TALEs/Genes; (B) a graph showing editing efficiency for linear vs. circular constructs containing Zinc Finger (ZF) protein; and (C) a graph showing editing efficiency for constructs containing Cas9 protein.

[0033] FIG. 18 shows a design of a construct to generate in situ circularized RNA containing a self-amplifying RNA construct (SEQ ID NO: 1330).

[0034] FIG. 19 provides sequence of IRESs (Table 2) useful in the methods and compositions of the disclosure.

[0035] FIG. 20 provides sequence of circular constructs useful in the methods and compositions of the disclosure (SEQ ID Nos: 1331-1342 and 1344-1346, respectively, in order of appearance).

### DETAILED DESCRIPTION

[0036] As used herein and in the appended claims, the singular forms “a,” “an,” and “the” include plural referents unless the context clearly dictates otherwise. Thus, for example, reference to “a prodrug” includes a plurality of such prodrugs and reference to “the chemotherapeutic agent” includes reference to one or more chemotherapeutic agents and equivalents thereof known to those skilled in the art, and so forth.

[0037] Also, the use of “or” means “and/or” unless stated otherwise. Similarly, “comprise,” “comprises,” “comprising” “include,” “includes,” and “including” are interchangeable and not intended to be limiting.

[0038] It is to be further understood that where descriptions of various embodiments use the term “comprising,” those skilled in the art would understand that in some specific instances, an embodiment can be alternatively described using language “consisting essentially of” or “consisting of.”

[0039] Unless defined otherwise, all technical and scientific terms used herein have the same meaning as commonly understood to one of ordinary skill in the art to which this disclosure belongs. Although many methods and reagents are similar or equivalent to those described herein, the exemplary methods and materials are disclosed herein.

[0040] All publications mentioned herein are incorporated herein by reference in full for the purpose of describing and disclosing the methodologies, which might be used in connection with the description herein. Moreover, with respect to any term that is presented in one or more publications that is similar to, or identical with, a term that has been expressly defined in this disclosure, the definition of the term as expressly provided in this disclosure will control in all respects.

[0041] It should be understood that this invention is not limited to the particular methodology, protocols, and reagents, etc., described herein and as such may vary. The terminology used herein is for the purpose of describing particular embodiments only and is not intended to limit the scope of the present invention, which is defined solely by the claims.

[0042] Other than in the operating examples, or where otherwise indicated, all numbers expressing quantities of ingredients or reaction conditions used herein should be understood as modified in all instances by the term “about.” The term “about” when used to described the present invention, in connection with percentages means±1%.

[0043] As used herein, the term “alphavirus” has its conventional meaning in the art, and includes the various species such as Venezuelan Equine Encephalitis (VEE) Virus, Eastern Equine Encephalitis (EEE) virus, Everglades Virus (EVE), Mucambo Virus (MUC), Pixuna Virus (PIX), and Western Equine Encephalitis Virus, all of which are members of the VEE/EEE Group of alphaviruses. Other alphaviruses include, e.g., Semliki Forest Virus (SFV), Sindbis, Ross River Virus, Chikungunya Virus, S.A. AR86, Barmah Forest Virus, Middleburg Virus, O'nyong-nyong Virus, Getah Virus, Sagiyama Virus, Bebaru Virus, Mayaro Virus, Una Virus, Aura Virus, Whataroa Virus, Banbanki Virus, Kyzylagach Virus, Highlands J Virus, Fort Morgan Virus, Ndumu Virus, and Buggy Creek Virus. Alphaviruses particularly useful in the constructs and methods described herein are VEE/EEE group alphaviruses.

[0044] The terms “alphavirus RNA replicon”, “alphavirus replicon RNA”, “alphavirus RNA vector replicon”, “vector replicon RNA” and “self-replicating RNA construct” are used interchangeably to refer to an RNA molecule expressing nonstructural protein genes such that it can direct its own replication (amplification) and comprises, at a minimum, 5′ and 3′ alphavirus replication recognition sequences, coding sequences for alphavirus nonstructural proteins, and a polyadenylation tract. It may additionally contain one or more elements (e.g., IRES sequences, core or mini-promoters, 2A peptide sequence and the like) to direct the expression, meaning transcription and translation, of a coding sequence of interest. The alphavirus replicon of the disclosure can comprise, in one embodiment, 5′ and 3′ alphavirus replication recognition sequences, coding sequences for alphavirus nonstructural proteins, a polyadenylation tract.

[0045] The term “adeno-associated virus” or “AAV” as used herein refers to a member of the class of viruses associated with this name and belonging to the genus depend parvovirus, family Parvoviridae. Multiple serotypes of this virus can be suitable for gene delivery. In some cases, serotypes can infect cells from various tissue types. Examples of AAV serotypes are AAV1, AAV2, AAV3, AAV4, AAV5, AAV6, AAV7, AAV8, AAV9, AAV10, and AAV11. Non-limiting exemplary serotypes useful for the purposes disclosed herein include any of the 11 serotypes, e.g., AAV2 and AAV8.

[0046] As used herein, the term “circularized” and/or “circular” used in the context of a nucleic acid molecule (e.g., an engineered guide RNA) can generally refer to a nucleic acid molecule that can be represented as a polynucleotide sequence in a circular 2-dimensional format with one nucleotide after the other wherein the represented polynucleotide is circular or a closed loop. In some embodiments, a circular nucleic acid molecule does not comprise a 5′ reducing hydroxyl, a 3′ reducing hydroxyl, or both capable of being exposed to a solvent

[0047] The term “complementary” as used herein refers to Watson-Crick base pairing between nucleotides and specifically refers to nucleotides hydrogen bonded to one another with thymine or uracil residues linked to adenine residues by two hydrogen bonds and cytosine and guanine residues linked by three hydrogen bonds. In general, a nucleic acid includes a nucleotide sequence described as having a “percent complementarity” or “percent homology” to a specified second nucleotide sequence. For example, a nucleotide sequence may have 808, 90%, or 100% complementarity to a specified second nucleotide sequence, indicating that 8 of 10, 9 of 10 or 10 of 10 nucleotides of a sequence are complementary to the specified second nucleotide sequence.

[0048] The term “encode” as it is applied to polynucleotides can refer to a polynucleotide which is said to “encode” a polypeptide if, in its native state or when manipulated, it can be transcribed and/or translated to produce the mRNA for the polypeptide and/or a fragment thereof. The antisense strand is the complement of such a nucleic acid, and the encoding sequence can be deduced therefrom.

[0049] The terms “equivalent” or “biological equivalent” are used interchangeably when referring to a particular molecule, biological or cellular material having minimal homology while still maintaining desired structure or functionality.

[0050] As used herein, “expression” can refer to the process by which polynucleotides are transcribed into mRNA and/or the process by which the transcribed mRNA is subsequently being translated into peptides, polypeptides, or proteins. If the polynucleotide is derived from genomic DNA, expression can include splicing of the mRNA in a eukaryotic cell.

[0051] “Homology” or “identity” or “similarity” can refer to sequence similarity between two peptides or between two nucleic acid molecules. Homology can be determined by comparing a position in each sequence which can be aligned for purposes of comparison. For example, when a position in the compared sequence is occupied by the same base or amino acid, then the molecules are homologous at that position. A degree of homology between sequences is a function of the number of matching or homologous positions shared by the sequences. An “unrelated” or “non-homologous” sequence shares less than 40% identity, or alternatively less than 25% identity, with one of the sequences of the disclosure.

[0052] Homology can refer to a percent (%) identity of a sequence to a reference sequence. As a practical matter, whether any particular sequence can be at least 508, 608, 708, 808, 85%, 90%, 92%, 95%, 96%, 97%, 98% or 99% identical to any sequence described herein, such particular peptide, polypeptide or nucleic acid sequence can be determined conventionally using computer programs such the Bestfit program (Wisconsin Sequence Analysis Package, Version 8 for Unix, Genetics Computer Group, University Research Park, 575 Science Drive, Madison, Wis. 53711). When using Bestfit or any other sequence alignment program to determine whether a particular sequence is, for instance, 95% identical to a reference sequence, the parameters can be set such that the percentage of identity is calculated over the full length of the reference sequence and that gaps in homology of up to 5% of the total reference sequence are allowed.

[0053] For example, in a specific embodiment the identity between a reference sequence (query sequence, a sequence of the disclosure) and a subject sequence, also referred to as a global sequence alignment, can be determined using the FASTDB computer program. In some cases, parameters for a particular embodiment in which identity is narrowly construed, used in a FASTDB amino acid alignment, can include: Scoring Scheme=PAM (Percent Accepted Mutations) 0, k-tuple=2, Mismatch Penalty=1, Joining Penalty=20, Randomization Group Length=0, Cutoff Score=1, Window Size=sequence length, Gap Penalty=5, Gap Size Penalty=0.05, Window Size=500 or the length of the subject sequence, whichever is shorter. According to this embodiment, if the subject sequence is shorter than the query sequence due to N- or C-terminal deletions, not because of internal deletions, a manual correction can be made to the results to take into consideration the fact that the FASTDB program does not account for N- and C-terminal truncations of the subject sequence when calculating global percent identity. For subject sequences truncated at the N- and C-termini, relative to the query sequence, the percent identity can be corrected by calculating the number of residues of the query sequence that are lateral to the N- and C-terminal of the subject sequence, which are not matched/aligned with a corresponding subject residue, as a percent of the total bases of the query sequence. A determination of whether a residue is matched/aligned can be determined by results of the FASTDB sequence alignment. This percentage can be then subtracted from the percent identity, calculated by the FASTDB program using the specified parameters, to arrive at a final percent identity score. This final percent identity score can be used for the purposes of this embodiment. In some cases, only residues to the N- and C-termini of the subject sequence, which are not matched/aligned with the query sequence, are considered for the purposes of manually adjusting the percent identity score. That is, only query residue positions outside the farthest N- and C-terminal residues of the subject sequence are considered for this manual correction. For example, a 90 residue subject sequence can be aligned with a 100 residue query sequence to determine percent identity. The deletion occurs at the N-terminus of the subject sequence and therefore, the FASTDB alignment does not show a matching/alignment of the first 10 residues at the N-terminus. The 10 unpaired residues represent 10% of the sequence (number of residues at the N- and C-termini not matched/total number of residues in the query sequence) so 108 is subtracted from the percent identity score calculated by the FASTDB program. If the remaining 90 residues were perfectly matched the final percent identity can be 90%. In another example, a 90 residue subject sequence is compared with a 100 residue query sequence. This time the deletions are internal deletions so there are no residues at the N- or C-termini of the subject sequence which are not matched/aligned with the query. In this case the percent identity calculated by FASTDB is not manually corrected. Once again, only residue positions outside the N- and C-terminal ends of the subject sequence, as displayed in the FASTDB alignment, which are not matched/aligned with the query sequence are manually corrected for.

[0054] “Hybridization” can refer to a reaction in which one or more polynucleotides react to form a complex that is stabilized via hydrogen bonding between the bases of the nucleotide residues. The hydrogen bonding can occur by Watson-Crick base pairing, Hoogstein binding, or in any other sequence-specific manner. The complex can comprise two strands forming a duplex structure, three or more strands forming a multi-stranded complex, a single self-hybridizing strand, or any combination of these. A hybridization reaction can constitute a step in a more extensive process, such as the initiation of a PC reaction, or the enzymatic cleavage of a polynucleotide by a ribozyme.

[0055] Examples of stringent hybridization conditions include: incubation temperatures of about 25° C. to about 37° C.; hybridization buffer concentrations of about 6×SSC to about 10×SSC; formamide concentrations of about 08 to about 258; and wash solutions from about 4×SSC to about 8×SSC. Examples of moderate hybridization conditions include: incubation temperatures of about 40° C. to about 50° C.; buffer concentrations of about 9×SSC to about 2×SSC; formamide concentrations of about 308 to about 50%; and wash solutions of about 5×SSC to about 2×SSC. Examples of high stringency conditions include: incubation temperatures of about 55° C. to about 68° C.; buffer concentrations of about 1×SSC to about 0.1×SSC; formamide concentrations of about 55% to about 75%; and wash solutions of about 1×SSC, 0.1×SSC, or deionized water. In general, hybridization incubation times are from 5 minutes to 24 hours, with 1, 2, or more washing steps, and wash incubation times are about 1, 2, or 15 minutes. SSC is 0.15 M NaCl and 15 mM citrate buffer. It is understood that equivalents of SSC using other buffer systems can be employed.

[0056] The term “isolated” as used herein can refer to molecules or biologicals or cellular materials being substantially free from other materials. In one aspect, the term “isolated” can refer to nucleic acid, such as DNA or RNA, or protein or polypeptide (e.g., an antibody or derivative thereof), or cell or cellular organelle, or tissue or organ, separated from other DNAs or RNAs, or proteins or polypeptides, or cells or cellular organelles, or tissues or organs, respectively, that are present in the natural source. The term “isolated” also can refer to a nucleic acid or peptide that is substantially free of cellular material, viral material, or culture medium when produced by recombinant DNA techniques, or chemical precursors or other chemicals when chemically synthesized. Moreover, an “isolated nucleic acid” is meant to include nucleic acid fragments which are not naturally occurring as fragments and may not be found in the natural state. In some cases, the term “isolated” is also used herein to refer to polypeptides which are isolated from other cellular proteins and is meant to encompass both purified and recombinant polypeptides. In some cases, the term “isolated” is also used herein to refer to cells or tissues that are isolated from other cells or tissues and is meant to encompass both cultured and engineered cells, or tissues.

[0057] A “ligation sequence” refers to a sequence complementary to another sequence, which enables the formation of Watson-Crick base pairing to form suitable substrates for ligation by a ligase, e.g., an RNA ligase. In one embodiment, a 5′ ligation sequence and a 3′ ligation sequence are substrates for an RNA ligase such as, but not limited to RtcB. The 5′ and 3′ ligation sequences when ligated circularize an RNA molecule of the disclosure. Such circularization reduces RNA degradation and improves persistence in vivo.

[0058] “Operably linked” refers to an arrangement of elements where the components so described are configured so as to perform their usual function. Thus, control sequences operably linked to a coding sequence are capable of effecting the transcription, and in some cases, the translation, of a coding sequence. The control sequences need not be contiguous with the coding sequence so long as they function to direct the expression of the coding sequence.

[0059] The terms “polynucleotide” and “oligonucleotide” are used interchangeably and refer to a polymeric form of nucleotides of any length, either deoxyribonucleotides or ribonucleotides or analogs or combinations thereof. Polynucleotides can have any three-dimensional structure and can perform any function. The following are non-limiting examples of polynucleotides: a gene or gene fragment (for example, a probe, primer, EST or SAGE tag), exons, introns, messenger RNA (mRNA), transfer RNA, ribosomal RNA, RNAi, ribozymes, cDNA, recombinant polynucleotides, branched polynucleotides, plasmids, vectors, isolated DNA of any sequence, isolated RNA of any sequence, nucleic acid probes and primers. A polynucleotide can comprise modified nucleotides, such as methylated nucleotides and nucleotide analogs. If present, modifications to the nucleotide structure can be imparted before or after assembly of the polynucleotide. The sequence of nucleotides can be interrupted by non-nucleotide components. A polynucleotide can be further modified after polymerization, such as by conjugation with a labeling component. The term also can refer to both double and single stranded molecules. Unless otherwise specified or required, any embodiment of this disclosure that is a polynucleotide can encompass both the double stranded form and each of two complementary single stranded forms known or predicted to make up the double stranded form. In some embodiments, a polynucleotide can include both RNA and DNA nucleotides.

[0060] The term “polynucleotide sequence” can be the alphabetical representation of a polynucleotide molecule. This alphabetical representation can be input into databases in a computer having a central processing unit and used for bioinformatics applications such as functional genomics and homology searching. In any alphabetic representation, the disclosure contemplates both RNA and DNA (wherein “T” is replaced with “U” or vice-a-versa).

[0061] In certain embodiments, “promoters” may be used to drive transcription of an operably linked nucleic acid. As used herein “promoter” refers to a DNA sequence which contains the binding site for RNA polymerase and initiates transcription of a downstream nucleic acid sequence. A promoter for use in the disclosure can be a constitutive, inducible or tissue specific, or a temporal promoter. Suitable promoters can be derived from viruses, prokaryotes and eukaryotes. Suitable promoters can be used to drive expression by any RNA polymerase. Examples of inducible promoters include, but are not limited to, T7 RNA polymerase promoter, T3 RNA polymerase promoter, isopropyl-beta-D-thiogalactopyranoside (IPTG)-regulated promoter, lactose induced promoter, heat shock promoter, tetracycline-regulated promoter, steroid-regulated promoter, metal-regulated promoter, estrogen receptor-regulated promoter, and the like. Inducible promoters can be regulated by various molecules such as doxycycline. In one embodiment, the promoter is a prokaryotic promoter selected from the group consisting of T7, T3, SP6 and derivatives thereof.

[0062] As used herein, a “ribozyme” (ribonucleic acid enzyme) is an RNA molecule capable of catalyzing biochemical reactions. A “self-cleaving ribozyme” is a ribozyme capable of cleaving itself. The ribozyme used in the disclosure can be any small endonucleolytic ribozyme that will self-cleave in the target cell type including, for example, hammerhead, hairpin, the hepatitis delta virus, the Varkud satellite, twister, twister sister, pistol and hatchet. See, e.g., Roth et al., Nat Chem Biol. 10 (1): 56-60; and Weinberg et al., Nat Chem Biol. 2015 August; 11 (8): 606-10, both incorporated herein by reference. U.S. 2015/0056174 provides modified hammerhead ribozymes with enhanced endonucleolytic activity. Ribozymes cleave the substrate RNA in a sequence specific manner at a substrate cleavage site. Typically, a ribozyme contains a catalytic region flanked by two binding regions. The ribozyme binding regions hybridize to the substrate RNA, while the catalytic region cleaves the substrate RNA at a substrate cleavage site to yield a cleaved RNA product. In various embodiment, the 5′ or 3′ of various constructs can be a Twister ribozyme or a Twister Sister ribozyme. For example, the 5′ and 3′ ribozymes of various constructs are either a P3 or P1 Twister ribozyme but not both P3 or both P1.

[0063] As used herein, the terms “transformation” and “transfection” are intended to refer to a variety of art-recognized techniques for introducing foreign nucleic acid into a host cell, including calcium phosphate or calcium chloride co-precipitation, DEAE-dextran-mediated transfection, lipofection (e.g., using commercially available reagents such as, for example, LIPOFECTIN® (Invitrogen Corp., San Diego, CA), LIPOFECTAMINE® (Invitrogen), FUGENE® (Roche Applied Science, Basel, Switzerland), JETPEI™ (Polyplus-transfection Inc., New York, NY), EFFECTENE® (Qiagen, Valencia, CA), DREAMFECT™ (OZ Biosciences, France) and the like), or electroporation. Suitable methods for transforming or transfecting host cells can be found in Sambrook, et al. (Molecular Cloning: A Laboratory Manual. 2nd, ed., Cold Spring harbor Laboratory, Cold Spring Harbor Laboratory Press, Cold Spring Harbor, N. Y., 1989), and other laboratory manuals. Standard recombinant DNA and molecular cloning techniques used herein are well known in the art and are described in Sambrook, J., Fritsch, E. F. and Maniatis, T., Molecular Cloning: A Laboratory Manual, 2nd ed.; Cold Spring Harbor Laboratory: Cold Spring Harbor, N.Y., (1989) and by Silhavy, T. J., Bennan, M. L. and Enquist, L. W., Experiments with Gene Fusions; Cold Spring Harbor Laboratory: Cold Spring Harbor, N. Y., (1984); and by Ausubel, F. M. et. al., Current Protocols in Molecular Biology, Greene Publishing and Wiley-Interscience (1987) each of which are hereby incorporated by reference in its entirety. Additional useful methods are described in manuals including Advanced Bacterial Genetics (Davis, Roth and Botstein, Cold Spring Harbor Laboratory, 1980), Experiments with Gene Fusions (Silhavy, Berman and Enquist, Cold Spring Harbor Laboratory, 1984), Experiments in Molecular Genetics (Miller, Cold Spring Harbor Laboratory, 1972) Experimental Techniques in Bacterial Genetics (Maloy, in Jones and Bartlett, 1990), and A Short Course in Bacterial Genetics (Miller, Cold Spring Harbor Laboratory 1992) each of which are hereby incorporated by reference in its entirety.

[0064] The terms “treat”, “treating” and “treatment”, as used herein, refers to ameliorating symptoms associated with a disease or disorder. Also, the terms “treat”, “treating” and “treatment” include preventing or delaying the onset of the disease or disorder symptoms, and/or lessening the severity or frequency of symptoms of the disease or disorder.

[0065] As used herein, the term “vector” can refer to a nucleic acid construct deigned for transfer between different hosts, including but not limited to a plasmid, a virus, a cosmid, a phage, a bacterial artificial chromosome (BAC), a yeast artificial chromosome (YAC), etc. In some embodiments, a “viral vector” is defined as a recombinantly produced virus or viral particle that comprises a polynucleotide to be delivered into a host cell, either in vivo, ex vivo or in vitro. In some embodiments, plasmid vectors can be prepared from commercially available vectors. In other embodiments, viral vectors can be produced from baculoviruses, retroviruses, adenoviruses, AAVs. In one embodiment, the viral vector is a lentiviral vector. Examples of viral vectors include retroviral vectors, adenovirus vectors, adeno-associated virus vectors, alphavirus vectors and the like. Infectious tobacco mosaic virus (TMV)-based vectors can be used to manufacturer proteins and have been reported to express Griffithsin in tobacco leaves. Alphavirus vectors, such as Semliki Forest virus-based vectors and Sindbis virus-based vectors, have also been developed for use in gene therapy and immunotherapy. In aspects where gene transfer is mediated by a retroviral vector, a vector construct can refer to the polynucleotide comprising the retroviral genome or part thereof, and a gene of interest.

[0066] The disclosure describes implementations of engineered endogenous RNA processing machinery to create linked RNA fusion constructs which can be utilized for RNA-based readouts for combinatorial genetic interaction screens as well as inducible gene expression. Separately transcribed sequences, with complementarity to one another, are fused to self-cleaving ribozymes. Once transcribed, the auto-catalytic activity of the ribozymes cleaves the transcripts to create unique ends. Due to the complementary region, the two transcripts will then hybridize, juxtaposing the cleaved ends which can then be recognized by endogenous RNA ligases to create a linked fusion construct. The disclosure further demonstrates the applicability of this approach to link two transcripts delivered to cells on disparate library elements, and when linked to intronic sequences, the RNA-fusion constructs can be utilized for controllable expression of full-length gene products.

[0067] The disclosure describes the use of engineered RNA elements that undergo multiple endogenous processing events to create linked RNA fusion constructs that can be used for a variety of applications, including combinatorial genetic screens or inducible gene expression. These elements, termed the left fragment (fragL) and right fragment (fragR), have been engineered to be expressed from both polymerase II and polymerase III promoters. In a particular embodiment, the RNA elements can further comprise flanking amplification primers, and/or a variable barcode region. The RNA elements comprise a 45-base pair (bp) complementary region to one another and are tethered to the P3 and P1 self-cleaving Twister ribozymes, as illustrated in FIG. 1A. Upon transcription, the P3 Twister ribozyme self-cleaves and generates a 5′ hydroxyl group on the fragL construct while the P1 Twister ribozyme generates a 2′,3′-cyclic phosphate group on the 3′ end of the fragR construct. Due to the complementary regions of the fragments, the two transcripts will then hybridize, juxtaposing these two ends which enables recognition by the endogenous ligase, RtcB, creating a linked fusion construct. By use of endogenous processing of these constructs, there is no need for additional factors to be added. Linking two disparate library elements delivered to cells individually, but to be analyzed and fused together downstream, has great utility for a variety of applications. Furthermore, the Twister ribozymes undergo autocatalytic self-cleavage rapidly upon transcription, within tens of seconds to minutes, and the linked constructs have longer half-lives than the individual transcripts, making this approach robust across multiple time scales.

[0068] The choice of fusion constructs is completely tunable, allowing for additional classes of ribozymes or transfer RNAs to be used in combination with different ligases and RNA processing enzymes to create higher order fusion linkages.

[0069] The feasibility of this approach is demonstrated through a simple plasmid transfection experiment in which fragL and fragR were cloned into the lentiCRISPRv2 backbone downstream of the U6 promoter. These were delivered to cells either individually or in combination and RNA was isolated 48 hours later. Reverse transcription polymerase chain reaction (RT-PCR) was performed using the flanking amplification primers. As shown in FIG. 1B, the generated RNA fusion was only observed when both plasmids were transfected together. The PCR product was then purified, and Sanger sequenced to confirm the expected fusion sequence (FIG. 1C).

[0070] A major limitation with prior implementation of genetic interaction screens is the need to physically link multiple perturbations on the same library element in order to enable genotype to phenotype mapping. This can make library generation complex and prevents different classes of genome and transcriptome engineering toolsets from being readily combined.

[0071] The disclosure described the engineering of RNA-fusion constructs to enable genotype to phenotype linking at the RNA level so that multiple libraries (e.g. CRISPR-knockout, CRISPR activation/inhibition, open reading frame, shRNA, etc.) can be delivered to cells individually, but read out together. This approach is demonstrated by cloning the ribozyme-RNA fusion constructs downstream of the U6-driven sgRNA sequence in the lentiCRISPRv2 backbone (termed sgRNA fragL and sgRNA fragR) (FIG. 2A). As shown in FIG. 2B, the presence of a non-targeting sgRNA transcript in the 5′ position of the RNA-fusion constructs does not alter the RNA-processing machinery that create the ligated fusion. Furthermore, the EcoRI restriction site on the sgRNA fragR construct shown in FIG. 2C highlights the ability to identify a theoretical barcode placed in this location for perturbation mapping using RNA-sequencing.

[0072] The ribozyme-mediated RNA-fusion constructs of the disclosure allow for genotype to phenotype linking at the RNA level so that multiple libraries (e.g., CRISPR-knockout, CRISPR activation/inhibition, open reading frame, shRNA, etc.) can be delivered to cells individually, but read out together. By using this approach with the ribozyme-mediated RNA fusion constructs of the disclosure, genetic interactions screens can be highly multiplexed. This approach allows for the linking of disparate libraries such as CRISPR-knockout sgRNA libraries and open reading frame overexpression libraries. Further, unprecedented insight into the regulatory networks that dictate cell function can be realized using the RNA fusion constructs disclosed herein by using screens looking at the combined activation and inhibition of genes, through systems such as CRISPRactivation and CRISPRinhibition, in a cell. A screening strategy with RNA fusions is not limited to fitness measurements and can be coupled to screens using other readouts such as phenotype, protein expression, or other functional endpoints that are broadly applicable across the biological sciences.

[0073] The RNA fusion constructs of the disclosure can be used in inducible gene expression systems. Inducible gene expression systems are powerful tools for a broad variety of basic and applied research areas, including functional genomics, tissue engineering, biopharmaceutical protein production, and gene therapy. The most common of these systems such as tetracycline-controlled operons, protein-protein interaction chimeric systems, and tamoxifen-controlled recombinase systems all require the addition of exogenous proteins. This can lead to immunogenic reactions in vivo and the delivery and transfection of these large-sized plasmids can be burdensome. The ribozyme-mediated RNA-fusion approach with intronic sequences described herein has broad utility. Through the addition of an aptazyme on either fragment that is responsive to molecules, such as tetracyline, theophylline, or guanine, the system of the disclosure can enable robust control of gene expression (see FIG. 3).

[0074] The RNA fusion constructs of the disclosure have great utility in gene therapy space to treat widespread diseases. In both type 1 and type 2 diabetes, insulin production is limited and therefore patients commonly must exogenously administer insulin when their blood glucose levels rise. The inducible ribozyme-mediated RNA-fusion system described herein can be adapted to contain two halves of the insulin gene fused to intronic sequences. The two constructs are constitutively present in muscular tissue, but one half would only be transcribed upon additional of an aptamer-binding ligand such as a synthetic sugar. This would lead to the rapid upregulation of ribozyme-mediated hybridization and splicing to generate the full length, functional insulin protein. Upon degradation of the inducer, the one fusion fragment would become repressed and no more insulin would be produced until more of the ligand is administered, thus replacing the need for painful and burdensome exogenous administration of insulin with an endogenous system with precise temporal control.

[0075] The inducible ribozyme-mediated RNA-fusion system described herein can be applied to generate an inducible gene expression system for the clotting factor IX for patients with hemophilia, the cystic fibrosis transmembrane conductance regulator protein for patients with cystic fibrosis, and the dystrophin protein for patients with Duchenne's muscular dystrophy. Broadly, any disease that results from a poorly expressed or mutated protein could benefit from the inducible ribozyme-mediated RNA-fusion system disclosed herein. This includes, but is not limited to, disease such as β-thalassemia, severe combined immunodeficiency, spinal muscle atrophy, and age-related macular degeneration.

[0076] The inducible ribozyme-mediated RNA-fusion system described herein can be broadly applied to gene therapies using the CRISPR/Cas toolset. CRISPR/Cas genome editing is highly adaptable and has been engineered to investigate and treat genetic diseases, cancers, immunological diseases, and infectious diseases. A major limitation in the translation of these therapies is the inability to control the expression of the Cas protein in vivo. The inducible ribozyme-mediated RNA-fusion system described herein can overcome this limitation by fusing two portions of the Cas protein to intronic sequences in the fragL and fragR constructs. One of these would be under the control of an inducer as described herein, making the expression of the Cas protein and its subsequent function completely inducible. This would enable precise control over the genome editing that is mediated by the CRISPR/Cas system. It is not limited to gene knockouts and could be broadly adapted to aid in controlled and inducible non-homologous end joining, homology directed repair, single-base exchanges, transcriptional regulation, base editors, PRIME editors, and RNA editing.

[0077] Additionally, experiments can be performed utilizing this system (see, e.g., FIG. 12A) to control the expression of the Yamanaka factors, including Oct3/4, Sox2, Klf4, and c-Myc (OSKM), in vivo. OSK and c-Myc can be cloned into an AAV expression vector with the aptazyme of choice subsequently cloned into the 3′ UTR. The Oct3/4, Sox2, and Klf4 can be cloned into a polycistronic vector and separated by the self-cleaving 2A peptides. c-Myc, a known oncogene, can be cloned into another plasmid with its own aptazyme control element. These plasmids can then be packaged into AAV vectors and then delivered either separately or together based on the reprogramming application at hand.

[0078] As the ribozyme rapidly cleaves the 3′-poly(A) tail upon transcription, the background expression of OSKM will be low and transduction via iAAV will not alter cellular state at baseline expression. Upon delivery of the ligand specific for the aptamer, the ribozyme will stabilize and the transduced cells will exhibit higher expression levels of OSKM based on the dose of the ligand that was delivered. With the rapid turnover kinetics of mRNA transcripts, the stabilization of the ribozyme and resulting gene expression levels are directly dependent on the half-life of the ligand delivered and the administration regimen that was chosen, thus enabling dynamic, pulsatile, and transient control of OSKM expression. As these transcription factors have been thoroughly studied to induce a state of pluripotency based upon their expression levels. This system can be utilized to dynamically reprogram cells in vivo.

[0079] Additionally, there have been a number of other “reprogramming factors” which have been implicated in directing cellular phenotype via their overexpression. Like OSKM, these factors require temporal control to effectively, and safely exhibit their effect on cell state. Therefore, the ribozyme-mediated control system can be used to dynamically control the expression of a broad range of genes in vivo which have an ability to reprogram cellular identity. These genes which the system could be applied to are included, but not limited to, those genes listed in Table 1.

[0080] This system is further tunable as the AAV serotype used can be altered without having to alter the expression plasmid. Various serotypes can be used which specifically target tissues such as AAV8 for the liver, AAV9 for skeletal muscle, or AAV-PHP.B for the central nervous system. Furthermore, engineered recombinant AAVs which specifically target distinct cell types can also be utilized in addition to the broad range of serotypes already available to further enhance the specificity of the partial reprogramming system.

TABLE 1

| GENE | ROLE (Involved in) | GENE | ROLE (Involved in) |
|---|---|---|---|
| ASCL1 | neuronal specification & differentiation. | LMX1A | neural develop. |
| | Demonstrated to drive neuronal | | |
| | differentiation from hPSCs | | |
| ASCL3 | salivary gland cell develop. | MEF2C | cardiac develop. |
| ASCL4 | develop. of skin | MESP1 | cardiac develop. |
| ASCL5 | Paralog of ASCL4 | MITF | pigment cell & melanocyte differentiat. |
| ATF7 | early cell signaling, binds cAMP response | MYC | cell proliferation, differ. & apoptosis. |
| | element | | Reprogramming factor for induction of pluripotency |
| CDX2 | trophectoderm specification & | MYCL | cell proliferation, differentiation & apoptosis |
| | differentiation | | |
| CRX | photoreceptor differentiation | MYCN | cell proliferation & differentiation |
| ERG | endothelial cell specification & | MYOD1 | skeletal muscle specification & differentiation, |
| | differentiation | | demonstrated to induce differentiation of hPSCs to |
| | | | skeletal muscle |
| ESRRG | cardiac develop. | MYOG | skeletal muscle specification & diff. |
| ETV2 | haemato-endothelial specification & diff. | NEURO | neuronal specification & diff .. Demonstrated to |
| | & vasculogenesis | D1 | induce neuronal diff. in hPSCs |
| FLI1 | haemato-endothelial specification & | NEURO | neuronal specification & differentiation |
| | differentiation | G1 | |
| FOXA1 | branching morphogenesis, develop. of | NEURO | pancreatic develop. & neuronal specification & |
| | lung, liver, prostate, pancreas | G3 | differentiation |
| FOXA2 | branching morphogenesis, develop. of | NRL | photoreceptor develop. |
| | notochord, lung, liver, prostate & | | |
| | pancreas | | |
| FOXA3 | cell glucose homeostasis | ONE- | retinal, liver, gallbladder & pancreatic develop. |
| | | CUT1 | |
| FOXP1 | develop. of hematopoietic cells, lung & | OTX2 | photoreceptor differentiation, pineal gland develop. |
| | esophagus, & neuronal develop. | | & induction & specification of forebrain & midbrain |
| GATA1 | erythroid develop. | PAX7 | specification & differentiation of satellite ells, |
| | | | demonstrated to induce myogenic precursor |
| | | | differentiation in hPSCs |
| GATA2 | hematopoietic develop. | POUIF1 | pituitary gland develop. |
| GATA4 | cardio. develop. | POU5F1 | regulation of pluripot & embryogenesis. |
| | | | Reprogramming factor for induction |
| GATA6 | cardiac, lung, endoderm & | RUNX1 | hematopoietic cell develop. |
| | extraembryonic develop. | | |
| GLI1 | neural stem cells prolif & neural tube | SIX1 | kidney, ear & olfactory epithelium develop. |
| | develop. | | |
| HAND2 | cardiac develop. | SIX2 | kidney develop. |
| HNF1A | liver, kidney, pancreatic & gut develop. | SNAJ2 | neural crest develop., epithelial-mesenchyme |
| | | | transition & melanocyte stemcell develop. |
| HNF1B | liver, kidney, pancreatic & gut develop. | SOX10 | neural crest & neuronal develop. |
| HNF4A | liver, kidney, pancreatic & gut develop. | SOX2 | regul. of pluripot & embryogenesis & in neuronal |
| | | | develop. Reprogramming factor for induction of |
| | | | pluripotency |
| HOXA1 | neural & cardio develop. | SOX3 | neuronal & pituitary develop. |
| HOXA10 | fertility, embryo viability, & regulation of | SPI1 | hematopoietic cell develop. |
| | hematopoietic lineage commitment | | |
| HOXA11 | kidney develop. | SPIB | differentiation of lymphoid cells |
| HOXB6 | lunch & epidermal develop. | SPIC | macrophage develop. |
| KLF4 | regulation of pluripotency & develop. of | SRY | sex determination & spermatogenesis |
| | skin, Reprogramming factor for induction | | |
| | of pluripotency | | |
| LHX3 | pituitary gland develop. | TBX5 | cardiac develop. |
| | | TFAP2C | trophectoderm develop. |

[0081] Utilizing the system described herein for the in vivo control of reprogramming factors, the system can be harnessed for a broad range of applications.

[0082] Generally, transient expression of the Yamanaka factors in vivo has been demonstrated to ameliorate aging hallmarks. The system of the disclosure with OSKM and the 3′-UTR aptazyme could be packaged into an AAV, designed to either have broad tropism across the body, or targeted to a specific organ via an engineered AAV. This could then be administered to the subject and allowed to transduce its target organs for a short period of time. Subsequently, the ligand that is specific for the aptamer sequence could be administered at the desired dose and treatment regimen in order to achieve cyclic expression of OSKM. The physiological alterations induced by this approach could include a reduction in the DNA damage response associated with aging, downregulation of senescence and stress-related genes, and alterations to the epigenetic modifications that occur with aging. These molecular alterations at the cellular level have important implications for reducing the systematic aging issues. Furthermore, in the context of specific diseases related to aging, such as Hutchinson-Gilford Progeria syndrome, this strategy can be an important therapeutic option to systematically reduce physiological hallmarks of aging while also prolonging the lifespan of those affected.

[0083] On the tissue-specific level, the system of the disclosure can demonstrate an important therapeutic benefit as engineering of the AAV capsid can be utilized for cell-specific targeting of the inducible-reprogramming strategy. In the central nervous system, transient expression of OSK could be utilized to restore youthful DNA methylation patterns and transcriptomes in the retinal ganglion cells in order to promote axonal regeneration after injury and promote vision restoration for the aging population or those afflicted with visual impairments such as glaucoma. Similarly, targeting the system of the disclosure to specific brain regions (e.g., hippocampus) can be an important tool for improving memory through specific targeting of dentate gyrus cells. In the cardiovascular system, targeting the system of the disclosure to cardiomyocytes can lead to dedifferentiation of these post-mitotic cells. This enabled regenerative capacity has the potential to broadly improve cardiac function with the potential to greatly improve cardiomyocyte recovery following traumatic events such as myocardial infarction. Administration of the inducible OSKM construct as described herein and then treating the afflicted individual with the inducing ligand could drastically improve recovery from cardiovascular events. Furthermore, myofiber- and liver-specific transient expression mediated by the system of the disclosure has the ability to promote muscle regeneration in vivo, which has broad implications in both the aging and diseased setting.

[0084] Aside from induced AAV-aptazyme mediated expression of OSKM, the methods and compositions of the disclosure can be applied to other reprogramming transcription factors (TFs) as well (Table 1). Depending on the outcome desired, TFs could be delivered either individually or in combination with either matching aptazyme sequences or separate aptazymes to enable temporal control of gene expression. These engineered TFs can be applied to the healthy and diseased settings with even broader implications for the whole field of regenerative medicine. The iAAV-partial reprogramming approach of the disclosure has broad applications across a diverse array of organ systems and disease settings.

[0085] RNA is inherently transient and this transience impacts their activity both as an interacting moiety as well as a template. Circularization of RNA improve persistence, however simple and scalable approaches to achieve the same are lacking. Utilizing autocatalytic RNA circularization as described herein, the disclosure provides compositions and methods of in situ circularized RNAs (icRNAs) for durable protein translation. Specifically, an in vitro transcribed linear RNA that bears an internal ribosome entry site coupled to a messenger RNA of interest that is in turn flanked by ribozymes is provided. Delivery of these linear RNAs into cells yields in situ circularized molecules upon autocatalytic cleavage of the ribozymes that leave termini which are ligated by endogenous RNA ligases (e.g., the ubiquitous endogenous RNA ligase RtcB) (see, e.g., FIG. 15). This scalable icRNA system has broad utility in basic science and therapeutic applications.

[0086] The icRNA system is exemplified herein in three contexts: first, durable protein expression via this system using GFP as a test protein (FIG. 16A-D); second, improved genome targeting via zinc finger nucleases; and third, genome targeting via CRISPRs, including deimmunized Cas9 proteins (FIG. 17A-C).

[0087] Compositions herein can be used to treat a disease or condition in a subject. For example, a ribozyme-activated RNA construct of the disclosure can be administered to treat a disease described herein.

[0088] A pharmaceutical composition can comprise a first active ingredient. The first active ingredient can comprise a ribozyme-activated RNA construct of the disclosure. The pharmaceutical composition can be formulated in unit dose form. The pharmaceutical composition can comprise a pharmaceutically acceptable excipient, diluent, or carrier. The pharmaceutical composition can comprise a second, third, or fourth active ingredient.

[0089] A composition described herein can compromise an excipient. In some cases, an excipient can comprise a pharmaceutically acceptable excipient. An excipient can comprise a cryo-preservative, such as DMSO, glycerol, polyvinylpyrrolidone (PVP), or any combination thereof. An excipient can comprise a cryo-preservative, such as a sucrose, a trehalose, a starch, a salt of any of these, a derivative of any of these, or any combination thereof. An excipient can comprise a pH agent (to minimize oxidation or degradation of a component of the composition), a stabilizing agent (to prevent modification or degradation of a component of the composition), a buffering agent (to enhance temperature stability), a solubilizing agent (to increase protein solubility), or any combination thereof. An excipient can comprise a surfactant, a sugar, an amino acid, an antioxidant, a salt, a non-ionic surfactant, a solubilizer, a triglyceride, an alcohol, or any combination thereof. An excipient can comprise sodium carbonate, acetate, citrate, phosphate, poly-ethylene glycol (PEG), sorbitol, sucrose, trehalose, polysorbate 80, sodium phosphate, sucrose, disodium phosphate, mannitol, polysorbate 20, histidine, citrate, albumin, sodium hydroxide, glycine, sodium citrate, trehalose, arginine, sodium acetate, acetate, HCl, disodium edetate, lecithin, glycerin, xanthan rubber, soy isoflavones, polysorbate 80, ethyl alcohol, water, teprenone, or any combination thereof. In some cases, a carrier or a diluent can comprise an excipient. In some cases, a carrier or diluent can comprise a water, a salt solution (e.g., a saline), an alcohol or any combination thereof.

[0090] Non-limiting examples of suitable excipients can include a buffering agent, a preservative, a stabilizer, a binder, a compaction agent, a lubricant, a chelator, a dispersion enhancer, a disintegration agent, a flavoring agent, a sweetener, a coloring agent.

[0091] In some cases, an excipient can be a buffering agent. Non-limiting examples of suitable buffering agents can include sodium citrate, magnesium carbonate, magnesium bicarbonate, calcium carbonate, and calcium bicarbonate. As a buffering agent, sodium bicarbonate, potassium bicarbonate, magnesium hydroxide, magnesium lactate, magnesium glucomate, aluminum hydroxide, sodium citrate, sodium tartrate, sodium acetate, sodium carbonate, sodium polyphosphate, potassium polyphosphate, sodium pyrophosphate, potassium pyrophosphate, disodium hydrogen phosphate, dipotassium hydrogen phosphate, trisodium phosphate, tripotassium phosphate, potassium metaphosphate, magnesium oxide, magnesium hydroxide, magnesium carbonate, magnesium silicate, calcium acetate, calcium glycerophosphate, calcium chloride, calcium hydroxide and other calcium salts or combinations thereof can be used in a pharmaceutical formulation.

[0092] In some cases, an excipient can comprise a preservative. Non-limiting examples of suitable preservatives can include antioxidants, such as alpha-tocopherol and ascorbate, and antimicrobials, such as parabens, chlorobutanol, and phenol. Antioxidants can further include but not limited to EDTA, citric acid, ascorbic acid, butylated hydroxytoluene (BHT), butylated hydroxy anisole (BHA), sodium sulfite, p-amino benzoic acid, glutathione, propyl gallate, cysteine, methionine, ethanol and N-acetyl cysteine. In some instances a preservatives can include validamycin A, TL-3, sodium ortho vanadate, sodium fluoride, N-a-tosyl-Phe-chloromethylketone, N-a-tosyl-Lys-chloromethylketone, aprotinin, phenylmethylsulfonyl fluoride, diisopropylfluorophosphate, kinase inhibitor, phosphatase inhibitor, caspase inhibitor, granzyme inhibitor, cell adhesion inhibitor, cell division inhibitor, cell cycle inhibitor, lipid signaling inhibitor, protease inhibitor, reducing agent, alkylating agent, antimicrobial agent, oxidase inhibitor, or other inhibitor.

[0093] In some cases, a pharmaceutical formulation can comprise a binder as an excipient. Non-limiting examples of suitable binders can include starches, pregelatinized starches, gelatin, polyvinylpyrolidone, cellulose, methylcellulose, sodium carboxymethylcellulose, ethylcellulose, polyacrylamides, polyvinyloxoazolidone, polyvinylalcohols, C12-C18 fatty acid alcohol, polyethylene glycol, polyols, saccharides, oligosaccharides, and combinations thereof.

[0094] The binders that can be used in a pharmaceutical formulation can be selected from starches such as potato starch, corn starch, wheat starch; sugars such as sucrose, glucose, dextrose, lactose, maltodextrin; natural and synthetic gums; gelatin; cellulose derivatives such as microcrystalline cellulose, hydroxypropyl cellulose, hydroxyethyl cellulose, hydroxypropyl methyl cellulose, carboxymethyl cellulose, methyl cellulose, ethyl cellulose; polyvinylpyrrolidone (povidone); polyethylene glycol (PEG); waxes; calcium carbonate; calcium phosphate; alcohols such as sorbitol, xylitol, mannitol and water or a combination thereof.

[0095] In some cases, a pharmaceutical formulation can comprise a lubricant as an excipient. Non-limiting examples of suitable lubricants can include magnesium stearate, calcium stearate, zinc stearate, hydrogenated vegetable oils, sterotex, polyoxyethylene monostearate, talc, polyethyleneglycol, sodium benzoate, sodium lauryl sulfate, magnesium lauryl sulfate, and light mineral oil. The lubricants that can be used in a pharmaceutical formulation can be selected from metallic stearates (such as magnesium stearate, calcium stearate, aluminum stearate), fatty acid esters (such as sodium stearyl fumarate), fatty acids (such as stearic acid), fatty alcohols, glyceryl behenate, mineral oil, paraffins, hydrogenated vegetable oils, leucine, polyethylene glycols (PEG), metallic lauryl sulphates (such as sodium lauryl sulphate, magnesium lauryl sulphate), sodium chloride, sodium benzoate, sodium acetate and talc or a combination thereof.

[0096] In some cases, a pharmaceutical formulation can comprise a dispersion enhancer as an excipient. Non-limiting examples of suitable dispersants can include starch, alginic acid, polyvinylpyrrolidones, guar gum, kaolin, bentonite, purified wood cellulose, sodium starch glycolate, isomorphous silicate, and microcrystalline cellulose as high HLB emulsifier surfactants.

[0097] In some cases, a pharmaceutical formulation can comprise a disintegrant as an excipient. In some cases, a disintegrant can be a non-effervescent disintegrant. Non-limiting examples of suitable non-effervescent disintegrants can include starches such as corn starch, potato starch, pregelatinized and modified starches thereof, sweeteners, clays, such as bentonite, micro-crystalline cellulose, alginates, sodium starch glycolate, gums such as agar, guar, locust bean, karaya, pectin, and tragacanth. In some cases, a disintegrant can be an effervescent disintegrant. Non-limiting examples of suitable effervescent disintegrants can include sodium bicarbonate in combination with citric acid, and sodium bicarbonate in combination with tartaric acid.

[0098] In some cases, an excipient can comprise a flavoring agent. Flavoring agents incorporated into an outer layer can be chosen from synthetic flavor oils and flavoring aromatics; natural oils; extracts from plants, leaves, flowers, and fruits; and combinations thereof. In some cases, a flavoring agent can be selected from the group consisting of cinnamon oils; oil of wintergreen; peppermint oils; clover oil; hay oil; anise oil; eucalyptus; vanilla; citrus oil such as lemon oil, orange oil, grape and grapefruit oil; and fruit essences including apple, peach, pear, strawberry, raspberry, cherry, plum, pineapple, and apricot.

[0099] In some cases, an excipient can comprise a sweetener. Non-limiting examples of suitable sweeteners can include glucose (corn syrup), dextrose, invert sugar, fructose, and mixtures thereof (when not used as a carrier); saccharin and its various salts such as a sodium salt; dipeptide sweeteners such as aspartame; dihydrochalcone compounds, glycyrrhizin; Stevia rebaudiana (Stevioside); chloro derivatives of sucrose such as sucralose; and sugar alcohols such as sorbitol, mannitol, sylitol, and the like.

[0100] A composition may comprise a combination of the active agent, e.g., a ribozyme-activated RNA construct of the disclosure, a compound or composition, and a naturally-occurring or non-naturally-occurring carrier, inert (for example, a detectable agent or label) or active, such as an adjuvant, diluent, binder, stabilizer, buffers, salts, lipophilic solvents, preservative, adjuvant or the like and include pharmaceutically acceptable carriers. Carriers also include pharmaceutical excipients and additives proteins, peptides, amino acids, lipids, and carbohydrates (e.g., sugars, including monosaccharides, di-, tri-, tetra-oligosaccharides, and oligosaccharides; derivatized sugars such as alditols, aldolic acids, esterified sugars and the like; and polysaccharides or sugar polymers), which can be present singly or in combination, comprising alone or in combination 1-99.99% by weight or volume. Exemplary protein excipients include serum albumin such as human serum albumin (HSA), recombinant human albumin (rHA), gelatin, casein, and the like. Representative amino acid/antibody components, which can also function in a buffering capacity, include alanine, arginine, glycine, arginine, betaine, histidine, glutamic acid, aspartic acid, cysteine, lysine, leucine, isoleucine, valine, methionine, phenylalanine, aspartame, and the like. Carbohydrate excipients are also intended within the scope of this technology, examples of which include but are not limited to monosaccharides such as fructose, maltose, galactose, glucose, D-mannose, sorbose, and the like; disaccharides, such as lactose, sucrose, trehalose, cellobiose, and the like; polysaccharides, such as raffinose, melezitose, maltodextrins, dextrans, starches, and the like; and alditols, such as mannitol, xylitol, maltitol, lactitol, xylitol sorbitol (glucitol) and myoinositol.

[0101] In some embodiments, a pharmaceutical composition can be formulated in milligrams (mg), milligram per kilogram (mg/kg), copy number, or number of molecules. In some cases, a composition can comprise about 0.01 mg to about 2000 mg of the active agent. In some cases, a composition can comprise about: 0.01 mg, 0.1 mg, 1 mg, 10 mg, 100 mg, 500 mg, 1000 mg, 1500 mg, or about 2000 mg of the active agent.

[0102] A subject, host, individual, and patient may be used interchangeably herein to refer to any organism eukaryotic or prokaryotic. In some cases, subject may refer to an animal, such as a mammal. A mammal can be administered a ribozyme-activated RNA construct of the disclosure or composition as described herein. Non-limiting examples of mammals include humans, non-human primates (e.g., apes, gibbons, chimpanzees, orangutans, monkeys, macaques, and the like), domestic animals (e.g., dogs and cats), farm animals (e.g., horses, cows, goats, sheep, pigs) and experimental animals (e.g., mouse, rat, rabbit, guinea pig). In some embodiments a mammal is a human. A mammal can be any age or at any stage of development (e.g., an adult, teen, child, infant, or a mammal in utero). A mammal can be male or female. A mammal can be a pregnant female. In some embodiments a subject is a human. In some embodiments, a subject has or is suspected of having a cancer or neoplastic disorder. In other embodiments, a subject has or is suspected of having a disease or disorder associated with aberrant protein expression. In some cases, a human can be more than about: 1 day to about 10 months old, from about 9 months to about 24 months old, from about 1 year to about 8 years old, from about 5 years to about 25 years old, from about 20 years to about 50 years old, from about 1 year old to about 130 years old or from about 30 years to about 100 years old. Humans can be more than about: 1, 2, 5, 10, 20, 30, 40, 50, 60, 70, 80, 90, 100, 110, or 120 years of age. Humans can be less than about: 1, 2, 5, 10, 20, 30, 40, 50, 60, 70, 80, 90, 100, 110, 120 or 130 years of age.

[0103] In some embodiments, method of treating a human in need thereof can comprise administering to the human a ribozyme-activated RNA construct of the disclosure. In some embodiments, compositions herein can be used to treat disease and conditions. A disease or condition can comprise a neurodegenerative disease, a muscular disorder, a metabolic disorder, an ocular disorder, or any combination thereof. The disease or condition can comprise cystic fibrosis, albinism, alpha-1-antitrypsin deficiency, Alzheimer disease, Amyotrophic lateral sclerosis (ALS), Asthma, β-thalassemia, Cadasil syndrome, Charcot-Marie-Tooth disease, Chronic Obstructive Pulmonary Disease (COPD), Distal Spinal Muscular Atrophy (DSMA), Duchenne/Becker muscular dystrophy, Dystrophic Epidermolysis bullosa, Epidermylosis bullosa, Fabry disease, Factor V Leiden associated disorders, Familial Adenomatous, Polyposis, Galactosemia, Gaucher's Disease, Glucose-6-phosphate dehydrogenase, Haemophilia, Hereditary Hematochromatosis, Hunter Syndrome, Huntington's disease, Hurler Syndrome, Inflammatory Bowel Disease (IBD), Inherited polyagglutination syndrome, Leber congenital amaurosis, Lesch-Nyhan syndrome, Lynch syndrome, Marfan syndrome, Mucopolysaccharidosis, Muscular Dystrophy, Myotonic dystrophy types I and II, neurofibromatosis, Niemann-Pick disease type A, B and C, NY-esol related cancer, Parkinson's disease, Peutz-Jeghers Syndrome, Phenylketonuria, Pompe's disease, Primary Ciliary Disease, Prothrombin mutation related disorders, such as the Prothrombin G20210A mutation, Pulmonary Hypertension, Retinitis Pigmentosa, Sandhoff Disease, Severe Combined Immune Deficiency Syndrome (SCID), Sickle Cell Anemia, Spinal Muscular Atrophy, Stargardt's Disease, Tay-Sachs Disease, Usher syndrome, X-linked immunodeficiency, various forms of cancer (e.g. BRCA1 and 2 linked breast cancer and ovarian cancer). In some cases, a disease or condition can comprise Mucopoysaccharidosis type I (MPSI). In some cases, the MPSI can comprise Hurler syndrome, Hurler-Scheie syndrome, Scheie syndrome, or any combination thereof. The disease or condition can comprise a muscular dystrophy, an ornithine transcarbamylase deficiency, a retinitis pigmentosa, a breast cancer, an ovarian cancer, Alzheimer's disease, pain, Stargardt macular dystrophy, Charcot-Marie-Tooth disease, Rett syndrome, or any combination thereof. Administration of a composition can be sufficient to: (a) decrease expression of a gene relative to an expression of the gene prior to administration; (b) edit at least one point mutation in a subject, such as a subject in need thereof; (c) edit at least one stop codon in the subject to produce a readthrough of a stop codon; (d) produce an exon skip in the subject, or (e) any combination thereof. A disease or condition may comprise a muscular dystrophy. A muscular dystrophy may include myotonic, Duchenne, Becker, Limb-girdle, facioscapulohumeral, congenital, oculopharyngeal, distal, Emery-Dreifuss, or any combination thereof. A disease or condition may comprise pain, such as a chronic pain. Pain may include neuropathic pain, nociceptive pain, or a combination thereof. Nociceptive pain may include visceral pain, somatic pain, or a combination thereof.

[0104] A vector can be employed to deliver a ribozyme-activated RNA construct of the disclosure. A vector can comprise DNA, such as double stranded DNA or single stranded DNA. A vector can comprise RNA. In some cases, the RNA can comprise one or more base modifications. The vector can comprise a recombinant vector. In some cases, the vector can be a vector that is modified from a naturally occurring vector. The vector can comprise at least a portion of a non-naturally occurring vector. Any vector can be utilized. In some cases, the vector can comprise a viral vector, a liposome, a nanoparticle, an exosome, an extracellular vesicle, or any combination thereof. In some embodiments, plasmid vectors can be prepared from commercially available vectors. In other embodiments, viral vectors can be produced from baculoviruses, retroviruses, adenoviruses, AAVs, or a combination thereof. In one embodiment, the viral vector is a lentiviral vector. Examples of viral vectors include retroviral vectors, adenovirus vectors, adeno-associated virus vectors, alphavirus vectors and the like. Infectious tobacco mosaic virus (TMV)-based vectors can be used to manufacturer proteins and have been reported to express Griffithsin in tobacco leaves. Alphavirus vectors, such as Semliki Forest virus-based vectors and Sindbis virus-based vectors, have also been developed for use in gene therapy and immunotherapy. In aspects where gene transfer is mediated by a retroviral vector, a vector construct can refer to the polynucleotide comprising the retroviral genome or part thereof, and a gene of interest. In some cases, a vector can contain both a promoter and a cloning site into which a polynucleotide can be operatively linked. Such vectors are capable of transcribing RNA in vitro or in vivo and are commercially available. In some cases, a viral vector can comprise an adenoviral vector, an adeno-associated viral vector (AAV), a lentiviral vector, a retroviral vector, a portion of any of these, or any combination thereof. In some cases, a nanoparticle vector can comprise a polymeric-based nanoparticle, an aminolipid based nanoparticle, a metallic nanoparticle (such as gold-based nanoparticle), a portion of any of these, or any combination thereof. In some cases, a vector can comprise an AAV vector. A vector can be modified to include a modified VP1 protein (such as an AAV vector modified to include a VP1 protein). An AAV can comprise a serotype-such as an AAV1 serotype, an AAV2 serotype, AAV3 serotype, an AAV4 serotype, AAV5 serotype, an AAV6 serotype, AAV7 serotype, an AAV8 serotype, an AAV9 serotype, an AAV10 serotype, an AAV11 serotype, a derivative of any of these, or any combination thereof.

[0105] In some embodiments, a vector can comprise a nucleic acid that encodes a linear precursor of a ribozyme-activated RNA construct of the disclosure. In some embodiments, a nucleic acid can comprise a linear precursor of a ribozyme-activated RNA construct of the disclosure. In some cases, the nucleic acid can be double stranded. In some instances, the nucleic acid can be DNA or RNA. In some cases, a nucleic acid can comprise more than one copy of a ribozyme-activated RNA construct of the disclosure. For example, a nucleic acid can comprise 2, 3, 4, 5, or more copies of a ribozyme-activated RNA construct of the disclosure. In some instances, the nucleic acid can comprise a U6 promoter, a CMV promotor or any combination thereof.

[0106] Certain vectors are capable of autonomous replication in a host cell into which they are introduced (e.g., bacterial vectors having a bacterial origin of replication and episomal mammalian vectors). Other vectors (e.g., non-episomal mammalian vectors) are integrated into the genome of a host cell upon introduction into the host cell, and thereby are replicated along with the host genome. Moreover, certain vectors are capable of directing the expression of genes to which they are operatively linked. Such vectors are referred to herein as “expression vectors.” In general, expression vectors of utility in recombinant DNA techniques are often in the form of plasmids. In the present specification, “plasmid” and ‘Vector” can be used interchangeably. However, the disclosure is intended to include such other forms of expression vectors, such as viral vectors (e.g., replication defective retroviruses, adenoviruses and adeno-associated viruses), which serve equivalent functions. Typically, the vector or plasmid contains sequences directing transcription and translation of a relevant gene or genes, a selectable marker, and sequences allowing autonomous replication or chromosomal integration. Suitable vectors comprise a region 5’ of the gene which harbors transcriptional initiation controls and a region 3′ of the DNA fragment which controls transcription termination. Both control regions may be derived from genes homologous to the transformed host cell, although it is to be understood that such control regions may also be derived from genes that are not native to the species chosen as a production host.

[0107] Typically, the vector or plasmid contains sequences directing transcription and translation of a gene fragment, a selectable marker, and sequences allowing autonomous replication or chromosomal integration. Suitable vectors comprise a region 5′ of the gene which harbors transcriptional initiation controls and a region 3′ of the DNA fragment which controls transcription termination. Both control regions may be derived from genes homologous to the transformed host cell, although it is to be understood that such control regions may also be derived from genes that are not native to the species chosen as a production host.

[0108] Initiation control regions or promoters, which are useful to drive expression of the relevant coding regions in the desired host cell are numerous and familiar to those skilled in the art. Virtually any promoter capable of driving these genetic elements is suitable for use in the disclosure. For example, a pol III promoter, a U6 promoter, a CMV promoter, a T7 promoter, an H1 promoter, can be used to drive expression. Termination control regions may also be derived from various genes native to the preferred hosts.

[0109] Administration of a ribozyme-activated RNA construct of the disclosure can be effected in one dose, continuously or intermittently throughout the course of treatment. Methods of determining the most effective means and dosage of administration can vary with the composition used for therapy, the purpose of the therapy, the target cell being treated, and the subject being treated. Single or multiple administrations can be carried out with the dose level and pattern being selected by the treating physician. Suitable dosage formulations and methods of administering the agents can vary and depend on the disease or condition. Routes of administration can vary with the composition used for treatment, the purpose of the treatment, the health condition or disease stage of the subject being treated, and target cell or tissue. Non-limiting examples of routes of administration include oral administration, nasal administration, injection, and topical application.

[0110] Administration can refer to methods that can be used to enable delivery of compounds or compositions to the desired site of biological action (such as DNA constructs, viral vectors, or others). These methods can include topical administration (such as a lotion, a cream, an ointment) to an external surface of a surface, such as a skin. These methods can include parenteral administration (including intravenous, subcutaneous, intrathecal, intraperitoneal, intramuscular, intravascular or infusion), oral administration, inhalation administration, intraduodenal administration, and rectal administration. In some instances, a subject can administer the composition in the absence of supervision. In some instances, a subject can administer the composition under the supervision of a medical professional (e.g., a physician, nurse, physician's assistant, orderly, hospice worker, etc.). In some cases, a medical professional can administer the composition. In some cases, a cosmetic professional can administer the composition.

[0111] Administration or application of a composition disclosed herein can be performed for a treatment duration of at least about 1, 2, 3, 4, 5, 6, 7, 8, 9, 10, 11, 12, 13, 14, 15, 16, 17, 18, 19, 20, 21, 22, 23, 24, 25, 26, 27, 28, 29, 30, 31, 32, 33, 34, 35, 36, 37, 38, 39, 40, 41, 42, 43, 44, 45, 46, 47, 48, 49, 50, 51, 52, 53, 54, 55, 56, 57, 58, 59, 60, 61, 62, 63, 64, 65, 66, 67, 68, 69, 70, 71, 72, 73, 74, 75, 76, 77, 78, 79, 80, 81, 82, 83, 84, 85, 86, 87, 88, 89, 90, 91, 92, 93, 94, 95, 96, 97, 98, 99, or 100 days consecutive or nonconsecutive days. In some cases, a treatment duration can be from about 1 to about 30 days, from about 2 to about 30 days, from about 3 to about 30 days, from about 4 to about 30 days, from about 5 to about 30 days, from about 6 to about 30 days, from about 7 to about 30 days, from about 8 to about 30 days, from about 9 to about 30 days, from about 10 to about 30 days, from about 11 to about 30 days, from about 12 to about 30 days, from about 13 to about 30 days, from about 14 to about 30 days, from about 15 to about 30 days, from about 16 to about 30 days, from about 17 to about 30 days, from about 18 to about 30 days, from about 19 to about 30 days, from about 20 to about 30 days, from about 21 to about 30 days, from about 22 to about 30 days, from about 23 to about 30 days, from about 24 to about 30 days, from about 25 to about 30 days, from about 26 to about 30 days, from about 27 to about 30 days, from about 28 to about 30 days, or from about 29 to about 30 days.

[0112] Administration or application of compositions disclosed herein can be performed at least 1, 2, 3, 4, 5, 6, 7, 8, 9, 10, 11, 12, 13, 14, 15, 16, 17, 18, 19, 20, 21, 22, 23, or 24 times a day. In some cases, administration or application of composition disclosed herein can be performed at least 1, 2, 3, 4, 5, 6, 7, 8, 9, 10, 11, 12, 13, 14, 15, 16, 17, 18, 19, 20, or 21 times a week. In some cases, administration or application of composition disclosed herein can be performed at least 1, 2, 3, 4, 5, 6, 7, 8, 9, 10, 11, 12, 13, 14, 15, 16, 17, 18, 19, 20, 21, 22, 23, 24, 25, 26, 27, 28, 29, 30, 31, 32, 33, 34, 35, 36, 37, 38, 39, 40, 41, 42, 43, 44, 45, 46, 47, 48, 49, 50, 51, 52, 53, 54, 55, 56, 57, 58, 59, 60, 61, 62, 63, 64, 65, 66, 67, 68, 69, 70, 71, 72, 73, 74, 75, 76, 77, 78, 79, 80, 81, 82, 83, 84, 85, 86, 87, 88, 89, or 90 times a month.

[0113] In some cases, a composition can be administered or applied as a single dose or as divided doses. In some cases, the compositions described herein can be administered at a first time point and a second time point. In some cases, a composition can be administered such that a first administration is administered before the other with a difference in administration time of 1 hour, 2 hours, 4 hours, 8 hours, 12 hours, 16 hours, 20 hours, 1 day, 2 days, 4 days, 7 days, 2 weeks, 4 weeks, 2 months, 3 months, 4 months, 5 months, 6 months, 7 months, 8 months, 9 months, 10 months, 11 months, 1 year or more.

[0114] Kits and articles of manufacture are also described herein that contain ribozyme-mediated RNA-fusion constructs or inducible ribozyme-mediated RNA-fusion system described herein. Such kits can comprise a carrier, package, or container that is compartmentalized to receive one or more containers such as vials, tubes, and the like, each of the container(s) comprising one of the separate elements to be used in a method described herein. Suitable containers include, for example, bottles, vials, syringes, and test tubes. The containers can be formed from a variety of materials such as glass or plastic.

[0115] For example, the container(s) can comprise one or more RNA fusion constructs described herein, optionally in a composition or in combination with another agent as disclosed herein. The container(s) optionally have a sterile access port (for example the container can be an intravenous solution bag or a vial having a stopper pierceable by a hypodermic injection needle). Such kits optionally comprise a compound disclosed herein with an identifying description or label or instructions relating to its use in the methods described herein.

[0116] A kit will typically comprise one or more additional containers, each with one or more of various materials (such as reagents, optionally in concentrated form, and/or devices) desirable from a commercial and user standpoint for use of a compound described herein. Non-limiting examples of such materials include, but are not limited to, buffers, diluents, filters, needles, syringes; carrier, package, container, vial and/or tube labels listing contents and/or instructions for use, and package inserts with instructions for use. A set of instructions will also typically be included.

[0117] A label can be on or associated with the container. A label can be on a container when letters, numbers or other characters forming the label are attached, molded or etched into the container itself; a label can be associated with a container when it is present within a receptacle or carrier that also holds the container, e.g., as a package insert. A label can be used to indicate that the contents are to be used for a specific therapeutic application. The label can also indicate directions for use of the contents, such as in the methods described herein. These other therapeutic agents may be used, for example, in the amounts indicated in the Physicians' Desk Reference (PDR) or as otherwise determined by one of ordinary skill in the art.

[0118] The following examples are intended to illustrate but not limit the disclosure. While they are typical of those that might be used, other procedures known to those skilled in the art may alternatively be used.

### Examples

[0119] Generation of RNA fusion constructs using plasmids. A simple plasmid transfection experiment was performed where fragL and fragR were cloned into the lentiCRISPRv2 backbone downstream of the U6 promoter. These were delivered to cells either individually or in combination and RNA was isolated 48 hours later. Reverse transcription polymerase chain reaction (RT-PCR) was performed using the flanking amplification primers. As shown in FIG. 1B, RNA fusion was observed when both plasmids were transfected together and not singly. The PCR product was then purified, and Sanger sequenced to confirm the expected fusion sequence (see FIG. 1C).

[0120] RNA-fusion constructs with small RNAs and polymerase III promoters Polymerase III (pol-III) promoters. The ribozyme-RNA fusion constructs were cloned downstream of the U6-driven sgRNA sequence in the lentiCRISPRv2 backbone (termed sgRNA fragL and sgRNA fragR) (see FIG. 2A). As shown in FIG. 2B, the presence of a non-targeting sgRNA transcript in the 5′ position of the RNA-fusion constructs did not alter the RNA-processing machinery that created the ligated fusion. Furthermore, the EcoRI restriction site on the sgRNA fragR construct shown in FIG. 2C highlights the ability to identify a theoretical barcode placed in this location for perturbation mapping using RNA-sequencing.

[0121] RNA-fusion constructs for combinatorial screening. The constructs were designed to be amenable to combinatorial screening by orienting the fragL and fragR sequences to be in the antisense direction to the lentiviral 5′ long terminal repeat promoter-controlled transcript (termed anti fragL and anti fragR). This design prevents degradation of transcripts during lentiviral production due to the fast cleavage rates of the Twister ribozyme implemented in the system. Correct ligation RNA-fusion construct sequences in the antisense direction were confirmed by RT-PCR and Sanger sequencing (see FIG. 2D-E). Furthermore, anti fragL and anti fragR constructs were cloned into plasmids containing fluorescent reporters to enable rapid selection of cells in which RNA-fusions are generated. Cells receiving both plasmids are easily identified via fluorescence and can undergo fluorescence-activated cell sorting to screen only those cells receiving both fragments in which the RNA fusion construct can be generated.

[0122] As it is desirable that the RNA-fusion system is modular across various polymerase III promoters, the constructs are demonstrated to be capable of fusing with one another when driven by the H1 promoter (FIG. 8A), which has been shown to demonstrate both polymerase II and polymerase III activity. As shown in FIG. 8B, when driven by the H1 promoter, the presence of the RNA fusion construct can be detected. This shows the system is flexible and amenable to the different promoters that may be present on various genome engineering constructs of interest.

[0123] Use of RNA-fusion constructs for combinatorial screening. By use of EcoRI restriction sites (se FIG. 2C), variable barcodes can be cloned into each sgRNA, or other perturbation, so that the constructs can be identified by the barcodes. This will ensure that each cell in the screen receives a unique pair of barcodes, that serves as unique molecular identifiers (UMIs), and in downstream counting all UMIs will be collapsed. The library further undergoes next generation sequencing (NGS) to create a lookup table matching barcodes to perturbations. This library is transduced at an intermediate multiplicity of infection such that most cells receive 2 library elements. Cells are then be sorted for GFP/tdTomato double positive fluorescence to screen cells receiving two barcodes. Cells are collected, and RNA isolated at multiple timepoints in the screen (day 3, day 14, day 21, and day 28) to ensure robust fitness measurements are obtained. The UMIs from the harvested RNAs are then selectively reverse transcribed, amplified, and sequenced. Next, the identified barcodes at each timepoint are mapped back to the initially generated lookup table to map genotype to phenotype across the experiment.

[0124] Ribozyme-mediated RNA fusion with larger RNAs and polymerase II promoters. To further probe the broad-range utility of ribozyme-mediate RNA fusion approach, fusion expression driven by a polymerase II (pol-II) promoter was next investigated. RNA polymerase II is responsible for the transcription of the most cellular genes (mRNA) and pol-II promoters such as EF1α, SV40, CMV, and RSV, as well as tissue specific promoters such as NEUROD2 in the CNS and TBX20 in the aorta, are important for the translation of effective gene therapies. It was postulated that the ribozyme-mediated RNA fusion approach could be engineered into an AAV backbone to enable precise control over the expression of various gene therapeutic modalities. The overall schematic for this approach is outlined in FIG. 3. Ligand-responsive aptamer sequences are coupled to the 3′ end of the fragL and 5′ end of the fragR construct. These aptamers have tertiary interactions with the ribozyme, stabilizing the catalytic loop such that no self-cleavage takes place. In the absence of cleavage, two fragments never hybridize and a ligated RNA-fusion transcript is not generated. Addition of a ligand disrupts the structural conformation of the aptamer so that it no longer stabilizes the ribozyme. The ribozyme then undergoes self-cleavage, generating the unique ends, and allowing the complementary regions of the two fragments to hybridize to one another and then by ligated together by the RtcB ligase.

[0125] To enable the inducible system to generate a full-length transcript and subsequent protein with no additional features, intronic sequences were fused between the therapeutic payload and the ribozyme-mediated fusion constructs (see FIG. 3). Once the two fragments hybridize and are ligated together, the features of the two introns, such as the 5′ and 3′ splice sites, the branch point, and the polypyrimidine tract can be recognized by cellular splicing machinery. Trans-splicing then takes place to remove the intronic sequences and fuse the two exons together to generate a full-length, functional transcript. The outline for the concept is shown in FIG. 4. Two halves of green fluorescent protein (GFP-L and GFP-R) that do not fluoresce when expressed individually were conjugated to intronic sequences. The ribozyme-mediated RNA fusion constructs were then cloned into the px600 AAV backbone. A two-intron model was initially utilized with longer intronic sequences (>250 bp each) derived from the Dihydrofolate reductase (DHFR) gene, which have previously been shown to undergo efficient splicing when linked together.

[0126] When each intron was cloned between one half of the GFP transcript and one construct of the ribozyme-mediated RNA fusion pair and transfected into HEK293T cells, fluorescence was only observed when both sequences were delivered in combination with one another (see FIG. 5A). RNA was isolated from these cells. RT-PCR and Sanger sequencing were used to show that the introns were efficiently spliced out and the full length GFP transcript was generated from the two halves (see FIG. 5B-C). The ability to generate a functional fluorescent protein through flow cytometry was further shown in FIG. 7.

[0127] Ribozyme-mediated exonuclease resistant and circular RNA fusion constructs. As this fusion barcode approach is mediated at the RNA-level, use of diverse RNA processing machinery can be used to further engineer the constructs to achieve desirable properties. The ribozyme mediated fusion barcodes can be engineered to contain a short “exonuclease-resistant” RNA (xrRNA) structures derived from viral genomes (FIG. 4). Once transcribed, these RNA elements can serve to prevent the processive exoribonucleolytic degradation of RNA. By integrating these into the fusion barcodes, the robustness and persistence of the barcode constructs can be increased in a cellular environment.

[0128] To further increase the persistence of the RNA barcodes in a cellular environment, a circularized RNA barcode design, which is illustrated in FIG. 9A. In this design, the left fragment design has been modified to contain a “designer exon” and a chimeric intron on the 3′ end of the construct (circ-fragL). The designer exon has can be optimized to be the appropriate length with various exon splicing enhancer (ESE) elements to promote the splicing out of the introns (sequences shown in FIG. 10). The right fragment is also modified on its 5′ end with an added intron followed by another designer exon and then the original fragR construct shown in FIG. 1 (circ-fragR). Once transcribed, the ribozyme can self-cleave allowing the complementary sequences to hybridize to one another. The ends generated by ribozyme cleavage can then be recognized by an endogenous RNA ligase, RtcB, which will create one fused end.

[0129] With the exons and introns close to one another, the spliceosome machinery will then recognize the various intronic elements and splice out the two introns, joining the two designer exons to one another via this back-splicing mechanism. This will result in the other end being fused together, creating a circularized construct. This construct circularizes in cells by transfecting HEK293T cells with the circ-fragL and circ-fragR. RNA was isolated 48 hours after transfection, reverse transcribed. PCR was performed to determine if circular RNA persisted. By utilizing two directional primer pairs, the RNA barcodes were being circularized and could be recovered from the pool of cellular RNA (FIG. 9B). With these constructs, the barcodes are robust in a complex cellular environment and therefore are better able to be used across a wider variety of screening platforms.

[0130] Use of a chimeric intron approach for gene expression. The gene expression system was tested by utilizing a chimeric intron (pCI) approach in which GFP-L was fused to the 5′ end of an intron derived from the β-hemoglobin gene containing the 5′ splice site while GFP-R was fused to the 3′ end of an intron derived from the human IgG gene containing the branch point, polypyrimidine tract, and 3′ splice site (FIG. 11). Using the pCI vectors containing the ribozyme-mediated RNA fusion constructs, robust expression of GFP was observed upon transfection of both plasmids. Fluorescence levels were comparable to the full length GFP transcript expressed individually, demonstrating a robust ability of the approach to generate functional protein (see FIG. 6A). When GFP total fluorescence was quantified with flow cytometry, the pCI system yielded 37% of cells GFP+, while the full GFP transcript in the px600 AAV backbone yielded 67% of cells GFP+ (see FIG. 6B), which is impressive considering each cell must be transfected with two plasmids in the pCI approach.

[0131] With high expression levels of GFP using the pCI system, the requirement that the complementary regions of the RNA from the fragL and fragR constructs hybridize with one another in order to get efficient splicing of the introns was next investigated. To investigate this, constructs were generated that only contained the intron and the GFP half, lacking the complementary region and the ribozyme (termed “LinkFree”). HEK293T cells were transfected using these constructs and their full-length counterparts. RNA was isolated after 48 hours, and RT-qPCR was performed to analyze GFP transcript relative expression normalized to GAPDH. As shown in FIG. 6C, GFP-DHFR intronic sequences were able to be spliced out without a hybridization requirement, as relative expression did not change much in the LinkFree system. Alternatively, the pCI system indicated a much stronger requirement for hybridization with an activation ratio (Full-length expression/LinkFree expression)>6 (see FIG. 6D-E).

[0132] For delivering various therapeutic modalities, it is sometimes advantageous to administer one viral vector to deliver the gene of interest. Therefore, constructs were further engineered with an inducible gene expression system to be contained on one plasmid so that the entire mechanism could be packaged into a single AAV vector. To accomplish this, a dual-promoter based system was used in which GFP-pCI-L was driven by the U6 promoter and GFP-PCI-R is driven by the CMV promoter (FIG. 11A). The transfection of this dual-promoter plasmid construct in HEK293T cells lead to expression of GEP (FIG. 11B) with an activation ratio (>80-fold) when compared to the dual-promoter link free design.

[0133] Accordingly, the RNA fusion concept utilizing ribozymes can be used to bring together separately delivered elements to generate a full length, functional proteins. Using pCI intron sequences, high expression levels were realized with a strong increase in expression upon hybridization of the ribozyme-generated complementary regions. This construct was further engineered to be packaged into one plasmid so that it could be packaged into an individual AAV capsid and delivered as a single vector. It is expected that controlled, inducible expression of an effector with the addition of a synthetic riboswitch or other inducible element on one or both constructs can also be utilized.

[0134] The disclosure demonstrates this feasibility of using a ribozyme-based approach including a tetracycline-responsive ribozyme embedded into the 3′ untranslated region (UTR) of a gene of interest (GOI). In this system, at the baseline level, the hammerhead ribozyme will self-cleave upon transcription, cleaving off the 3′-poly(A) tail, destabilizing the RNA transcript and leading to relatively low gene expression. Addition of the tetracycline ligand leads to the ligand binding to the tetracycline-responsive aptamer with a high affinity. This induces a conformational change in the secondary structure of the RNA molecule which disrupts the tertiary loop-loop interaction of the hammerhead ribozyme which prevents cleavage of the poly(A) tail and stabilizes the mRNA transcript, allowing for increased expression of the GOI (FIG. 12A).

[0135] The disclosure exemplifies the tetracycline induced expression of insulin by cloning the tetracycline hammerhead aptazyme into the 3′ UTR of a modified insulin construct. The proinsulin sequence was modified with a H10D, K29R, R31K, and L62R mutations to enable the processing of proinsulin to mature insulin by a furin protease in organs outside of the pancreas. As shown in FIG. 12B, upon transfection into HEK293T cells in vitro, induction of insulin secretion into the cell culture supernatant was accomplished upon the addition of tetracycline (125 μM). This effect was shown to be dependent upon the presence of the tetracycline-hammerhead aptazyme as the positive control (AAV-Insulin) shows no tetracycline induced fold change in secreted insulin expression. As it is advantageous to control the expression of insulin on a patient-by-patient basis, the disclosure further demonstrates that the tetracycline-induced expression of mature insulin occurs in a tetracycline dose-dependent manner (FIG. 12C). To demonstrate the tunability of insulin expression dynamics with this ribozyme-based approach several versions of the insulin riboswitch designs was generated and cloned into the pZac AAV backbone. The number and location of the tetracycline-hammerhead aptazymes (FIG. 13A), and then quantified the amount of insulin that was secreted in the cell culture supernatant of HEK293T cells 48 hours after transfection upon addition of either DMEM or tetracyline (125 μM) 4-6 hours after transfection. As shown in FIG. 13B, the addition of multiple aptazymes resulted in lower background (no tetracycline) expression of insulin. Due to these low background levels, greater than 20-fold induction of secreted insulin with one of the constructs upon the addition of tetracycline.

[0136] Through this 3′UTR aptazyme based approach, the disclosure demonstrates the feasibility of utilizing this approach to address the insulin needs of diabetic patients. The disclosure shows in vitro that the levels of mature insulin expression are dose-dependent and tunable with engineering of the construct.

[0137] The feasibility of this disclosure is also shows by first demonstrating its effectiveness with a 3′UTR tetracycline-hammerhead aptazyme, as shown in FIG. 12A. The px601 plasmid backbone was used and the aptazyme riboswitch cloned into the 3′ UTR between the SaCas9 protein and the bGH poly(A) sequence (FIG. 14A). The expression of SaCas9 was demonstrated to be tetracycline-inducible in vitro by transfecting HEK293T cells with the plasmid and changing media 4-6 hours after transfection to either DMEM alone or DMEM containing 125 μM tetracycline. RNA was isolated 48 hours after transfection, reverse transcribed, and the relative expression of the SaCas9 transcript was quantified relative to GAPDH through a qPCR assay. As shown in FIG. 14B, a reduction in the background was observed, no ligand condition with an increase in expression upon the addition of tetracycline-containing media (˜6-fold).

[0138] The disclosure demonstrates tetracycline-inducible genome editing by SaCas9 in vivo using AAV8 capsid with the construct of FIG. 14B. For these in vivo experiments a SaCas9-specific single-guide RNA targeting the mouse Pcsk9 gene was cloned in to the vector. These capsids were then administered to 6-8-week-old C57Bl/6 mice via retro-orbital injection at a dose of 5E12 viral genomes/mouse. Serum was collected every week and administered tetracycline (30 mg/kg) at the 2- and 5-week timepoint was performed. Additionally, at the 5- and 7-week timepoints, the livers from a subset of the mice were harvested, DNA was isolated, and the Cas9-induced Pcsk9 genome editing was quantified using Synthego's Inference for CRISPR Edits (ICE) tool (FIG. 14C). As shown in FIG. 14D, a decrease was observed in serum PCSK9 protein levels, as measured by a mouse PCSK9 ELISA kit, following the first 3-day tetracycline-administration, suggesting that the gene editing induced by Cas9-mediated gene knockdown was ligand-dependent. When the livers were harvested and the proportion of DNA edited at the Pcsk9 locus was quantified, an effect of DNA editing was observed based on the tetracycline regimen received by the mouse groups. At the 5-week timepoint following one round of a three-day tetracycline regimen, <5% editing of the Pcsk9 locus was quantitated, while an additional three-day tetracycline regimen increased the proportion of edited DNA to around 78 (FIG. 14E). Through this experiment, the level of DNA editing mediated by SaCas9 is shown to be tunable based on the tetracycline regimen when utilizing the AAV-Cas9-Riboswitch based approach.

[0139] Persistence of RNA constructs. An RNA construct was generated by transcribing a DNA nucleic acid having a T7 promoter operably linked to a DNA construct encoding a 5′ P3 twister ribozyme, a 5′ ligation sequence, an IRES operably linked to a coding sequence for GFP, a linker and 3′ ligation sequence and a 3′ Twister ribozyme followed by a poly-T tail to obtain a linear RNA construct (see FIG. 16A).

[0140] 293T were seeded at 25% confluency in 12 wells and transfected with lipid-RNA complexes consisting of 1 μg of mutated circular or circular GFP RNA and 3.5 μL Lipofectamine MessengerMax. RNA was isolated from cells over three days using the Qiagen RNeasy Kit and qPCR was performed to determine the amount of circularized RNA. **p<0.01 t-test comparison within each day. (See FIG. 16B-D).

[0141] 293T were seeded at 25% confluency in 12 wells and transfected with lipid-RNA complexes consisting of 1 μg of mutated circular or circular GFP RNA and 3.5 μL Lipofectamine MessengerMax. RNA was isolated from cells over three days using the Qiagen RNeasy Kit and qPCR was performed to determine the amount of GFP RNA. *p<0.05 t-test comparison within each day.

[0142] 293T were seeded at 25% confluency in 12 wells and transfected with lipid-RNA complexes consisting of 1 μg of mutated circular or circular zinc finger RNA and 3.5 μL Lipofectamine MessengerMax. DNA was isolated using the Qiagen DNeasy Blood & Tissue Kit, the edited region was amplified and Sanger sequenced, and editing efficiency was quantified using the Synthego ICE CRISPR Analysis Tool. 293T were seeded at 25% confluency in 12 wells and transfect with lipid-RNA complexes consisting of 1 μg Cas wildtype or variant RNA, 1 μg T2 guide RNA, and 3.5 μL Lipofectamine MessengerMAX. After 3 days, genomic DNA was isolated using the Qiagen DNeasy Blood & Tissue Kit, the edited region was amplified and Sanger sequenced, and editing efficiency was quantified using the Synthego ICE CRISPR Analysis Tool. (See FIG. 17A-C).

[0143] To generate a circular format for vaccines, a self-amplifying RNA system such as those associated with alpha-viruses was used downstream of the IRES. (see FIG. 18A-B).

[0144] It will be understood that various modifications may be made without departing from the spirit and scope of this disclosure. Accordingly, other embodiments are within the scope of the following claims.

The application's sequence listing, which the Patent Office published only in electronic form, follows.

SEQUENCE LISTING (1360 sequences)

SEQ ID NO: 1 - DNA, 174 bp, Artificial Sequence
  Description of Artificial Sequence: Synthetic polynucleotide
aaaaacttccggcgggaaccggaaggtgcggtggcactcacggaatctcgggtcttctgacgtgccgggcgggaagatgtcatcattgccaagaagagcgaaagtacaggtccaggatgtggtactgaaagatgaattttcttcattctctgagttatcatctgcctctgaaga

SEQ ID NO: 2 - DNA, 174 bp, Artificial Sequence
  Description of Artificial Sequence: Synthetic polynucleotide
aaaatccaccccaacaatcgctgtgtgccgctttagtgcgctcgccgtcggctctacctgcgtgctttagctccttctcgcctgatccttctgtctctcccaaccccggacacccggcttcgactggttatatcttcggtgttcttttcctctcttcttctttcgcggttcagc

SEQ ID NO: 3 - DNA, 174 bp, Artificial Sequence
  Description of Artificial Sequence: Synthetic polynucleotide
aaacgtcaggtatcttttaaatcgcgatagttttcgctgtgtcaggctttcttcggtggagctccgagggtagctaggttctaggtttgaaacagatgcagaatccaaaggcagcgcaaaaaacagccaccgattttgctatgtctctgagctgcgagataatcagacagctaa

SEQ ID NO: 4 - DNA, 174 bp, Artificial Sequence
  Description of Artificial Sequence: Synthetic polynucleotide
aaactggtcactgcagtttctaataatactattcaagtccacacatttcctgaaggagttccagatggtatattgactcgcttcactacaaatgcaaaccatgtggtctttaatggggatggtactaaaattgctgctggatctagtgattttctagtcaaaattgtggatgtg

SEQ ID NO: 5 - DNA, 174 bp, Artificial Sequence
  Description of Artificial Sequence: Synthetic polynucleotide
aaagatcgctgtgcagtcagccttaaacactgactgcacccctcccagatttcttttacattaactaaaaagtcttatcacacaatctcataaaatttatgtaatttcatttaattttagccacaaatcatcaaaatgacgaggattttgacagctttcaaagtggtgaggaca

SEQ ID NO: 6 - DNA, 174 bp, Artificial Sequence
  Description of Artificial Sequence: Synthetic polynucleotide
aaagcctattttcttttcgtttagatacattgccttttgcctaggctggcgtcgagacttgaggccgttgcagactttggcgcggctcgcgcctcctgcttcaagagcccagcggtgagagctggcctgcggcacgcggcctaatgccagacagtaacagtttggaggatcaag

SEQ ID NO: 7 - DNA, 174 bp, Artificial Sequence
  Description of Artificial Sequence: Synthetic polynucleotide
aaaggaaccgggttgtcttgggccgggcagggcgggtggtgactctcaaaaggaaataggatcatggcagcagatgatgacaatggtgatggaacaagtttatttgatgtcttttctgcttctcctcttaagaacaatgatgaaggctcactggacatatacgctgggttggac

SEQ ID NO: 8 - DNA, 174 bp, Artificial Sequence
  Description of Artificial Sequence: Synthetic polynucleotide
aaagtcgtcccaccatcaatgaaggcaggccacttccggcgtagccatggcggctaacgctactaccaacccgtcgcagctgctgcccttagagcttgtggacaaatgtataggatcaagaattcacatcgtgatgaagagtgataaggaaattgttggtactcttctaggatt

SEQ ID NO: 9 - DNA, 174 bp, Artificial Sequence
  Description of Artificial Sequence: Synthetic polynucleotide
aaagtgctgggattacaggagtgtgccactgcgcctgaccagctttataaagtttatagggacagtgtcaccactttacagaagagggactgaggctctgaggaggaagttccttgccagggtccgagtgtcgccaccctgagaactccagcacccacctccctactctccctc

SEQ ID NO: 10 - DNA, 174 bp, Artificial Sequence
  Description of Artificial Sequence: Synthetic polynucleotide
aaagtggctgaatgagaaatgtagattgcagagggcaactggtgtgtttatatgcctgacattatttgggttttcccccctcaggcagaagctgaggaagattgtcattctgatactgtcagagcagatgatgatgaagaaaatgaaagtcctgctgaaacagatctgcaggca

SEQ ID NO: 11 - DNA, 174 bp, Artificial Sequence
  Description of Artificial Sequence: Synthetic polynucleotide
aaatagtctactttccggtagcggtgccagggcagtggcctaatacggaactccatttcccggcgtgcctcgcggaggccgctgaactcagaagcgggaggccggttccggttgcatcagcgagggattcacggcgaaatgagactgttcgtgagtgatggcgtcccgggttgc

SEQ ID NO: 12 - DNA, 174 bp, Artificial Sequence
  Description of Artificial Sequence: Synthetic polynucleotide
aaatcacactggctacagcgttgtgtgtttcttggtaaacactgggtaaatcagctcctgtggatgttgactgaagtttctatgtttgcaagctaatcctcagcagtttctttatgtattgctgtccttgaatattagcccatttgaaaacgcctgggaagttcagccatcagt

SEQ ID NO: 13 - DNA, 174 bp, Artificial Sequence
  Description of Artificial Sequence: Synthetic polynucleotide
aaatggagacttaggtcccctgcaaagcagaggggaggctggggtcacagctggccactgagagacccatccccctcagcaccgtggcttcccagctctccctgtcctcctccccccgacatctgccccttccctcctaaccccaggaccaggggacccagatctggagctttg

SEQ ID NO: 14 - DNA, 174 bp, Artificial Sequence
  Description of Artificial Sequence: Synthetic polynucleotide
aacacgcaggcgcgtctcctcaaatcctgtccctacacccctcctctttctcttcatttcgttccccctcctcttgcagcacctcggcaggttcaaactcttctccgggagcgtggcggcgatcgcgaggtcacgtgatgagcatcctgctgcccaacatggcggagttcgaca

SEQ ID NO: 15 - DNA, 174 bp, Artificial Sequence
  Description of Artificial Sequence: Synthetic polynucleotide
aacgctcagcgaaattgactgccccactgtcatctgcctctcaatttggtactctgtaactctgtgaccaccaagaagcctttttccgtcccccacaaagctctttttggaaaattccctacgggagctgaattttaagcccatttactttataggaagaaacagaaaggcagc

SEQ ID NO: 16 - DNA, 174 bp, Artificial Sequence
  Description of Artificial Sequence: Synthetic polynucleotide
aacgtggtggggcagggcctccgagcgtggttggactttgaaggggatcggccgccatgctgcatcccctttttggaattgctcaaccaggtggtaaccggcgccgcttcctggccttgggaggtggttcctttcttaacccacaagaacctctcccaagagaacttggtcctg

SEQ ID NO: 17 - DNA, 174 bp, Artificial Sequence
  Description of Artificial Sequence: Synthetic polynucleotide
aactcgcgggagcgtcaccgtcctgcgacgcttcagaggatccttaggcctcagtggtctttgacccccggccccaggacctgaccccaaggaaacctccgggacctgtggctggagagggactttgaacatgtcggggatcgccctcagcagactcgcccaggagaggaaagc

SEQ ID NO: 18 - DNA, 174 bp, Artificial Sequence
  Description of Artificial Sequence: Synthetic polynucleotide
aactcggtgagtgacctgcgatgtccgcgaccctcaaccttggcccagcccgcgagccgcgcctgggcctggacttaggatggaacccttccggagaaggctgtacgcagggcctcaaagacgtcccacccgagccgacccgagacatcctcgctttaaagagccttccccggg

SEQ ID NO: 19 - DNA, 174 bp, Artificial Sequence
  Description of Artificial Sequence: Synthetic polynucleotide
aactgggcggtaaaatagcccttctgttactgtccggggctgcggggtgagaggccagggccgagaagggcttcaggacgcgggaggcgcacttgcttcaagtcgcgggcgtgggaacggggttgcaaaacggggcctctttgtccgggcttgcttccggcgtcatggctcaaa

SEQ ID NO: 20 - DNA, 174 bp, Artificial Sequence
  Description of Artificial Sequence: Synthetic polynucleotide
aagaaaatcctgcttgacaaaaaccgtcacttaggaaaagatgtcctttcgggcagccaggctcagcatgaggaacagaaggaatgacactctggacagcacccggaccctgtactccagcgcgtctcggagcacagacttgtcttacagtgaaagcgacttggtgaattttat

SEQ ID NO: 21 - DNA, 174 bp, Artificial Sequence
  Description of Artificial Sequence: Synthetic polynucleotide
aagaagaaaaatgtgttgtgagcagggggagcctcagctgcctcaggccgttcaggacagaagggtgtttctgaaggccggagcaagttttgaagaagtccctatcagattacacttggttgactactccggagcagccactaagagggatgaacaggcctgcgtggaaattga

SEQ ID NO: 22 - DNA, 174 bp, Artificial Sequence
  Description of Artificial Sequence: Synthetic polynucleotide
aagaaggaaactagctgggaccgtgcagattcatcacaagagagctacaagagcctggaagaagctgaagactgctaccctccatccttactcaccctggacctgagagacctcttcaatcaggtggagcaaggccctctcctgtcctgccccaaggctggcacagacttgagc

SEQ ID NO: 23 - DNA, 174 bp, Artificial Sequence
  Description of Artificial Sequence: Synthetic polynucleotide
aagatactcctcacctgctccttgaatgacagcgccacagaggtcacagggcaccgctggctgaaggggggcgtggtgctgaaggaggacgcgctgcccggccagaaaacggagttcaaggtggactccgacgaccagtggggagagtactcctgcgtcttcctccccgagccc

SEQ ID NO: 24 - DNA, 174 bp, Artificial Sequence
  Description of Artificial Sequence: Synthetic polynucleotide
aaggaagctgtaaatgtatttgagttaagcttttgcgagaaaccctacagcttggggcctgggctcctctgaccatcctcattgagaaaggaaagtgagtccagagaagttgatgcttcctacctgttggagcggcccagcagtgtaagcgtggttgttactgccccatccgcc

SEQ ID NO: 25 - DNA, 174 bp, Artificial Sequence
  Description of Artificial Sequence: Synthetic polynucleotide
aagttgaaaaagctgcatgcagttggaagggatcttcagatggtgctggtgactttctgttccttttggagttgacatgcatgtggattggaggaaaaataatcaacatatattctcctttcgtactgtttaaatcacaggaagaagcggctttaagacaaagatcaaaccaaa

SEQ ID NO: 26 - DNA, 174 bp, Artificial Sequence
  Description of Artificial Sequence: Synthetic polynucleotide
aatattagagtctcaacccccaataaatataggactggagatgtctgaggctcattctgccctcgagcccaccgggaacgaaagagaagctctatctcccctccaggagcccagctatgaactccttctccacaagcgccttcggtccagttgccttctccctggggctgctcc

SEQ ID NO: 27 - DNA, 174 bp, Artificial Sequence
  Description of Artificial Sequence: Synthetic polynucleotide
aatgctaaaggaaaaattttcttagcaatttcacaggaaaacctaagttttaagagaggttatcattctgactgggaactgaactattatgactaggtctataatttaataacaagtcacaatatctctctttcttgacatcaatttaaggtgacttttcacatagtagagaga

SEQ ID NO: 28 - DNA, 174 bp, Artificial Sequence
  Description of Artificial Sequence: Synthetic polynucleotide
aatggactctagcctcctctgatagcctcatgccaggccccgtgcacattgctttgcttgcctccctcaatcctcatagcttctctttgggaagcctttgggtctgaagtgtctgtgagacctcacagaagagcacccctgggctccacttacctgccccctgctccttcaggg

SEQ ID NO: 29 - DNA, 174 bp, Artificial Sequence
  Description of Artificial Sequence: Synthetic polynucleotide
aattggaggagttgttgttaggccgtcccggagacccggtcgggagggaggaaggtggcaagatggtgttggaaagcactatggtgtgtgtggacaacagtgagtatatgcggaatggagacttcttacccaccaggctgcaggcccagcaggatgctgtcaacatagtttgtc

SEQ ID NO: 30 - DNA, 174 bp, Artificial Sequence
  Description of Artificial Sequence: Synthetic polynucleotide
acaagcacatgaacatgaagccggccactgcctctgctctgctcctgctcctgctgggcctggcctggacccaggggagccacggctggggtgcggacgcgtcatcactgcagaaacgtgcaggcagagccgatcagaactacaattacaaccagcatgcgtatcccactgcct

SEQ ID NO: 31 - DNA, 174 bp, Artificial Sequence
  Description of Artificial Sequence: Synthetic polynucleotide
acaatcctttgcggtggttcaagatggcggcgcccagtggcactgtgagcgattcggaaagtagtaacagcagtagcgatgcggaggagctggagcggtgccgcgaggcggcaatgccggcttggggcttggagcaacgcccgcacgtggcagggaagccaagagccggtgctg

SEQ ID NO: 32 - DNA, 174 bp, Artificial Sequence
  Description of Artificial Sequence: Synthetic polynucleotide
acactacttatcattgatgcatatataaaaccattttattttcgctattatttcagaggaagcgcctctgatttgtttcttttttccctttttgctctttctggctgtgtggtttggagaaagcacagttggagtagccggttgctaaataagtcccgagcgcgagcggagacg

SEQ ID NO: 33 - DNA, 174 bp, Artificial Sequence
  Description of Artificial Sequence: Synthetic polynucleotide
acactaggtttttacagcaattctctgatgaccttgatatggtagaacgctgtgtatttcaagagtaagctctcgtttgaggagactaacaattcctgttttcgccagatttcttcttgaatggcaacctaaatgccagtccaaagaggcccccaatagacttgttcacccttc

SEQ ID NO: 34 - DNA, 174 bp, Artificial Sequence
  Description of Artificial Sequence: Synthetic polynucleotide
acagatccgccatgacaaaggaggagagtcggggacttgagccgtggctccgacttgggcggagcctggaggggggtggttgcgatacggggaccggagaatttgcactttaaagtccgggtctgcccgttttcgtttcacagtaaccgacgtctcaagtcagaacatccagtc

SEQ ID NO: 35 - DNA, 174 bp, Artificial Sequence
  Description of Artificial Sequence: Synthetic polynucleotide
acagtgctttcaaaagaattggcgtccgctgttcgcctctcctcccgggagtcttctgcctactcccagaagaggagggaagcacaggtgggtttctttagctctgcgtcggatccctgagaacttcgaagccatcctggctgaggctaatctccgctgtgcttcctctgcagt

SEQ ID NO: 36 - DNA, 174 bp, Artificial Sequence
  Description of Artificial Sequence: Synthetic polynucleotide
acagttagaaaattaggaaaacagtggtttaacttgaattctctcttgacgggtccagaattaatatcagatacatatcttgcacttttcttggctcaattacaacaggaaggttattctatatttgtcgttaagggtgatctgccagattgcgaagctgaccaactcctgcag

SEQ ID NO: 37 - DNA, 174 bp, Artificial Sequence
  Description of Artificial Sequence: Synthetic polynucleotide
acatctctcagccctctcagctgcaccggaccaccaacagttgtgattcaatgggcatgaattgctgtgtgatgctggggaggtgtttgtgattcttgacaaagtcatttgaatccatcacttcaagagagtgaaaggagccccgtctgatctgttggtgttgtaggaagaaac

SEQ ID NO: 38 - DNA, 174 bp, Artificial Sequence
  Description of Artificial Sequence: Synthetic polynucleotide
accagctgatattttctttcctcaggaccagctgttcaggagcatcccggacgagagccaggcacatttgagacttggatccaactaaagaccgccgcagattcttctgcagcaatgtcggtgttagaagaaaatcggccgtttgctcaacaattatccaatgtctactttaca

SEQ ID NO: 39 - DNA, 174 bp, Artificial Sequence
  Description of Artificial Sequence: Synthetic polynucleotide
accatagtctgtgtccgcgttcttttttccgggactgcagagttcggggaagctgtacgccgcctttcgctacgcggaatttgcagatcttcccctggacctcaggcctctccggctggagtagggtggacgcttcacataagcttctctggtcgaacttacccgaatctccag

SEQ ID NO: 40 - DNA, 174 bp, Artificial Sequence
  Description of Artificial Sequence: Synthetic polynucleotide
acccaggatgcggaggcccttgtggggctgtggccactagggagtttcttggtcacaggacgtgaccccagccaggccctggtgttgaggtcaggacctttaccaggagaagtcaatacctaccagatccagaagattcccagaggtgtgtccctggaatcctccaacctctgc

SEQ ID NO: 41 - DNA, 174 bp, Artificial Sequence
  Description of Artificial Sequence: Synthetic polynucleotide
acccccgagcccccgcagccctagagccgcccaagggatggcgatggcgtacttggcttggagactggcgcggcgttcgtgtccgaggtcactagtttcccggtagttcagctgcacatgaatagaacagcaatgagagccagtcagaaggactttgaaaattcaatgaatcaa

SEQ ID NO: 42 - DNA, 174 bp, Artificial Sequence
  Description of Artificial Sequence: Synthetic polynucleotide
acccgagcaccttctcttcactcagccaactgctcgctcgctcacctccctcctctgcaccatgaccacctgcagccgccagttcacctcctccagctccatgaagggctcctgcggcatcgggggcggcatcgggggcggctccagccgcatctcctccgtcctggccggagg

SEQ ID NO: 43 - DNA, 174 bp, Artificial Sequence
  Description of Artificial Sequence: Synthetic polynucleotide
accggattttccttctccctctctctatctccacagatcccttcccaagaggagtctcctgctaaaacttcatcatctcaagttgacctgccacttcacccaaggaggcaagctcttgcctgtaacagtgtatttgccaacatggcacccaaaaagaagattgtcaaaaagaac

SEQ ID NO: 44 - DNA, 174 bp, Artificial Sequence
  Description of Artificial Sequence: Synthetic polynucleotide
acctaactccaacccccgcaattctcgctcccttcacctgatgattcagggctgaacaaggccaggatgtccattctaggcccatcggtgctgtcttgctgaaggttgggtcaggcatctaaagggactgtggtaagggagggtgtgacacaggtgtaagctgccatcgtcatc

SEQ ID NO: 45 - DNA, 174 bp, Artificial Sequence
  Description of Artificial Sequence: Synthetic polynucleotide
acctgttgtctctcacctctacattggatcacatggtcacctgcctcatggaaatgccttttttaaaacttcgatttgcagaactccactatttttatacctagctacagttttgagaaagaagaatcagaaccctgacccacttacggttgctgggacaattccccctcccgc

SEQ ID NO: 46 - DNA, 174 bp, Artificial Sequence
  Description of Artificial Sequence: Synthetic polynucleotide
acgacaatatggcggcgcttagttgcatgaaggcggaaactctgtgacttcgggtccgtagtggggcctgcggtgggagtgggaaggaaggcggagggaaccatgcgaggttctgagaattgcggcgagggtcgcctcgagagacggtttctgagcatcatcgtgctggatgat

SEQ ID NO: 47 - DNA, 174 bp, Artificial Sequence
  Description of Artificial Sequence: Synthetic polynucleotide
acgactgcgtgggtgagtcgtctataaaaactcatctctgcgcgtctcttcgccacattcgcttcctgctttcggtgtgtctgttgtgtcttgttgcgggcaccgcagtcgccgtgaagatggcgtctaccagccgtttggatgctcttccaagagtcacatgtccaaaccatc

SEQ ID NO: 48 - DNA, 174 bp, Artificial Sequence
  Description of Artificial Sequence: Synthetic polynucleotide
acgcttgcgcgcgggatttaaactgcggcggtttacgcggcgttaagacttcgtagggttagcgaaattgaggtttcttggtattgcgcgtttctcttccttgctgactctccgaatggccatggactcgtcgcttcaggcccgcctgtttcccggtctcgctatcaagatcca

SEQ ID NO: 49 - DNA, 174 bp, Artificial Sequence
  Description of Artificial Sequence: Synthetic polynucleotide
acggaaacagaaattgctttgcggcccgcacggaaattgctttccttcggcttccgttcttggtccatgtgagagaagctggctgctgaaatgactgcgaaccggcttgcagagagccttctggctttgagccaacaggaagaactagcggatttgccaaaagactacctcttg

SEQ ID NO: 50 - DNA, 174 bp, Artificial Sequence
  Description of Artificial Sequence: Synthetic polynucleotide
acggcggggggcgtgccccctcccagcccagcctccccaacccggcccgcccgccgcgtcgcgggggcatgtgagcgggaagcctaggctgccagccgcgaggaccgcacggaggaggagcaggagcgcggagccgcgagccccgagccccgagcccggcgcctggctgagtag

SEQ ID NO: 51 - DNA, 174 bp, Artificial Sequence
  Description of Artificial Sequence: Synthetic polynucleotide
acgtcaccggctgcgcccttcagtatcgcggacggaagatggcgtccgccacccgtctcatccagcggctgcggaactgggcgtccgggcatgacctgcaggggaagctgcagctacgctaccaggagatctccaagcgaactcagcctcctcccaagctccctgtgggtccta

SEQ ID NO: 52 - DNA, 174 bp, Artificial Sequence
  Description of Artificial Sequence: Synthetic polynucleotide
acgtccggcttaccgtcgtttacgacagtgtcaggatcgcgggcttgctttccggtagcgtgggctgacgcctcgctcaatttctcacagggctgcgcaggtttcccccgtctgcgaatggaccactggaggggttcaaaggttcgcgtcccagtacgggaatgagcctctttg

SEQ ID NO: 53 - DNA, 174 bp, Artificial Sequence
  Description of Artificial Sequence: Synthetic polynucleotide
acgtgtgtatgtgtgtgtgtgtgtattgggtttctctctcccttgtaagaacacagccagcccgccctctcctgctgttgctgcagctctgacttgctttttcctgcctccttcctctcctctctcttcttgcttagcttcttgccttctgatactactcccaagatggaggct

SEQ ID NO: 54 - DNA, 174 bp, Artificial Sequence
  Description of Artificial Sequence: Synthetic polynucleotide
actccactagggcacgcaggcgacgagcacactggcagagggcctcccgcagggcccactccccacctggctctcgccccaccatggcccgggaagcaggccaggtttgtgccaggcctgccgtgcccagggggaggaagggctctgtgttctttgcctgtgtctctgtggtga

SEQ ID NO: 55 - DNA, 174 bp, Artificial Sequence
  Description of Artificial Sequence: Synthetic polynucleotide
actcgccctccagcttctgccctgcctgctgtgtgcggagccgtccagcgaccaccatggtgaggctcgtgctgcccaaccccggcctagacgcccggatcccgtccctggctgagctggagaccatcgagcaggaggaggccagctcccggccgaagtgggacaacaaggcgc

SEQ ID NO: 56 - DNA, 174 bp, Artificial Sequence
  Description of Artificial Sequence: Synthetic polynucleotide
actgctttcctgggagtcaagttaaaacttctctcctgtgaccttgtcacccggcagtggaaagttacccttggctgcagccacgacttccgcatactcttcagaacttgctctgcccttgagttttccagctttcctttaatgcactaaacctttaatattgtattctcctaa

SEQ ID NO: 57 - DNA, 174 bp, Artificial Sequence
  Description of Artificial Sequence: Synthetic polynucleotide
actggaaagttcaagagtgtctttgctggctctttcttgaatatttccaaagccttggaagttacaggttttgggtgtgggataaggaaaaactgaatgatagagcacaggtaccgctcccctttcctcatcatgcctctctgtcgcctctttgttcatagttgaccacggcat

SEQ ID NO: 58 - DNA, 174 bp, Artificial Sequence
  Description of Artificial Sequence: Synthetic polynucleotide
acttccgcgggcacccaactgtgcgtctcctgcgcgctgacgtcaggtgcgtgcccctgtccggcagccgaggagaccccgcgcagtgctgccaacgccccggtggagaagctgaggtcatcatcagatttgaaatatttaaagtggatacaaaactatttcagcaatgcagac

SEQ ID NO: 59 - DNA, 174 bp, Artificial Sequence
  Description of Artificial Sequence: Synthetic polynucleotide
acttccgggatctgtcagccgctccctctgggcttccgtcctccgcccgcgcccgacggagcctgttcgcgtcgactgcccagagtccgcgaatcctccgctccgagcccgtccggactcccccgatcccagctttctctcctttgaaaacactaagaataatgtcactgcatc

SEQ ID NO: 60 - DNA, 174 bp, Artificial Sequence
  Description of Artificial Sequence: Synthetic polynucleotide
actttactgcaagccttagtcagagtacaaagggttcctgcttggtggttttgctgcagcttcagagtttagcctgaactgtggcaggattttgtaacttgcacattttttgagaagtctgatggaggtataatgtccacggtcgattatttgaacagtgtttctggagatcat

SEQ ID NO: 61 - DNA, 174 bp, Artificial Sequence
  Description of Artificial Sequence: Synthetic polynucleotide
agaacagtttcatttccggagccaccggaagcagcttgcaaatggcgtctccctcgctggagcggccagaaaaaggcgctggaaaaagtgaatttcgtaaccagaagccgaagccggagaaccaagatgaatcagaactccttacggttcctgatggttggaaggaaccagctt

SEQ ID NO: 62 - DNA, 174 bp, Artificial Sequence
  Description of Artificial Sequence: Synthetic polynucleotide
agaaccttcaactgtcaagcaccgagctagccaccagcatgctgtactccccagggccgagtcttccggagtcagcagagagcctggatggatcacaggaggataagcctcggggctcatgtgcggagcccacttttactgatacgggaatggtggctcacataaacaacagcc

SEQ ID NO: 63 - DNA, 174 bp, Artificial Sequence
  Description of Artificial Sequence: Synthetic polynucleotide
agacaatagaaagcaatgcgcctattcacatggagaatcttccctttcctctaaaattacttagtgcctcatcactaaacacccccagctccacaccatgggtgttggatatcttcctcaccttggtgtttgccctggggttcttcttcctattactcccctacttctcttacc

SEQ ID NO: 64 - DNA, 174 bp, Artificial Sequence
  Description of Artificial Sequence: Synthetic polynucleotide
agacttcctccttcacttgcctggacgctgcgccacatcccaccggcccttacactgtggtgtccagcagcatccggcttcatggggggacttgaaccctgcagcaggctcctgctcctgcctctcctgctggctgtaagtgattgcagttgctctacggtgagcccgggcgtg

SEQ ID NO: 65 - DNA, 174 bp, Artificial Sequence
  Description of Artificial Sequence: Synthetic polynucleotide
agacttggtatagtgggagagcctgactgaggtggctctagccagtctaattgccgttcctttagctagtggcatcttgattcctgctgtgtcttaactgaccattgtcttaaattctagagtggatcatgacccatgaagagcaccatgcagccaaaaccctggggattggca

SEQ ID NO: 66 - DNA, 174 bp, Artificial Sequence
  Description of Artificial Sequence: Synthetic polynucleotide
agagaaggagccagggagggtggcagggaggccacgtgatccgagtcccctcacccctttccttcccacaggtccctggccaaagatttatttctcttgacaaccaagggcctccgtctggatttccaaggaagaatttcctctgaagcaccggaacttgctactaccagcacc

SEQ ID NO: 67 - DNA, 174 bp, Artificial Sequence
  Description of Artificial Sequence: Synthetic polynucleotide
agagacacgaatatgtttcagccgcaacaggctgcgtttcagccggaagagtgaaagggcaccttgaaaacgcaagtttatgaatatgtttctgtactttcagaccatcatcaaagaggggatgctgaccaaacagaacaattcattccagcgatcaaaaaggagatactttaa

SEQ ID NO: 68 - DNA, 174 bp, Artificial Sequence
  Description of Artificial Sequence: Synthetic polynucleotide
agagccggcgccgtcaccgcccgcattgccgctcccagtcccgcgctcggcacgacatgaaatcccccgacgaggtgctacgcgagggcgagttggagaagcgcagcgacagcctcttccagctatggaagaagaagcgcggggtgctcacctccgaccgcctgagcctgttcc

SEQ ID NO: 69 - DNA, 174 bp, Artificial Sequence
  Description of Artificial Sequence: Synthetic polynucleotide
agaggaggagggcacttttgtgtgatggcaacttcacttctagggcgtggtgcttgctcccgaatcagacgccggcagccaaacttgtcccctcctgtagagtaggaagcggccgggcgccggggctgttgggggtgccaggaagaaccgaggttgggatcgactcctctggcc

SEQ ID NO: 70 - DNA, 174 bp, Artificial Sequence
  Description of Artificial Sequence: Synthetic polynucleotide
agagtggactgagcagccagtaggggagagagcagttaaggcacacagagcaccagctccctcctgcctgaagatgttccaccaaatttgggcagctctgctctacttctatggtattatccttaactccatctaccagtgccctgagcacagtcaactgacaactctgggcgt

SEQ ID NO: 71 - DNA, 174 bp, Artificial Sequence
  Description of Artificial Sequence: Synthetic polynucleotide
agatggcgtgcttgttggagaccccaatccgcatgagcgtcctttcgtttttttaaagaaaaagacgactttcacctttcactatgttgctcttgaaccaggaccaggaatgaaagttactgggagataacttcgaaggattttgcaacaaattcgagctgtccgactctgaga

SEQ ID NO: 72 - DNA, 174 bp, Artificial Sequence
  Description of Artificial Sequence: Synthetic polynucleotide
agattgctgaattacgtgcctccttcggagaaccccacccagtcccgggcccagggcagtaacttgcccattggaaaggggaaagcagaggccacactcagtgacaatggccacaaggaacattggctagcatgtggatgacctctgtttccttacaggctctgaagcccttcc

SEQ ID NO: 73 - DNA, 174 bp, Artificial Sequence
  Description of Artificial Sequence: Synthetic polynucleotide
agattgtttcacatcaccagtgtatcctcagctcctaacactgtgtctggtacacattgtttgatggttttgatgtttcagattcgttatatttcacaaacacaaggcttgccagctgaatatcttctcagtgccggaacaaaaacaaccaggtttttcaacagagatcctaat

SEQ ID NO: 74 - DNA, 174 bp, Artificial Sequence
  Description of Artificial Sequence: Synthetic polynucleotide
agcaagtccgcggtaagcgctgacgcatgcgcatagctaaccgcacccggttcagctcgcctttcttggccagaggcgccggttggactcacgggcggggcatgatggtggtgggtacgggcacctcgctggcgctctcctccctcctgtccctgctgctctttgctgggatgc

SEQ ID NO: 75 - DNA, 174 bp, Artificial Sequence
  Description of Artificial Sequence: Synthetic polynucleotide
agcacacacacatctgcacctcaaccacagactacacttgctgaactggctcctggggccatgaggctgtcactgccactgctgctgctgctgctgggagcctgggccatcccagggggcctcggggacagggcgccactcacagccacagccccacaactggatgatgaggag

SEQ ID NO: 76 - DNA, 174 bp, Artificial Sequence
  Description of Artificial Sequence: Synthetic polynucleotide
agcacgtcctgttttcgttggccgcgctgggatggccgccacagctgtaggtgctgctagtgtttagcgctggtctttgccgggcgttgagggcagctcagcctccttgtttgtccggttcgcctgtgcgtggtactcaagggcaccagtattcccgcggtcggcagcatgggt

SEQ ID NO: 77 - DNA, 174 bp, Artificial Sequence
  Description of Artificial Sequence: Synthetic polynucleotide
agcatggtggttgataaccgaagggcaaaagcatcacttatttagtgtgtgttatagaaattttttagacaaccttactagctaacccaggtgaccctttacggatttctttcaaagccaatttgaataaacaactcttccctctcaaatgggcaagagtaactcttcagcacc

SEQ ID NO: 78 - DNA, 174 bp, Artificial Sequence
  Description of Artificial Sequence: Synthetic polynucleotide
agccaattctgaccgtgtcaacgaatcatccacgcacctgcagctctgctgagagagtgcaagccgtgggggttttgagctcatcttcatcattcatatgaggaaataagtggtaaaatccttggaaatacaatgagactcatcagaaacatttacatattttgtagtattgtt

SEQ ID NO: 79 - DNA, 174 bp, Artificial Sequence
  Description of Artificial Sequence: Synthetic polynucleotide
agccagggagagggtgtgagggcagatctgggggtgcccagatggaaggaggcaggcatgggggacacccaaggccccctggcagcaccatgaactaagcaggacacctggaggggaagaactgtggggacctggaggcctccaacgactccttcctgcttcctggacaggact

SEQ ID NO: 80 - DNA, 174 bp, Artificial Sequence
  Description of Artificial Sequence: Synthetic polynucleotide
agcccaagatttctagggcattggccgcgctgctgggtgatccctccgggctcaagttgcaagggggcgggccgggccggaggtggagtctcccgccaattgaagcctccgctataaattgaactccctgcactgctgaagcccagatgcctcgccaggccacgtcgcggttgg

SEQ ID NO: 81 - DNA, 174 bp, Artificial Sequence
  Description of Artificial Sequence: Synthetic polynucleotide
agccctgcattccttacccttggttggattcttcccgggctgggagaaatgaccgcttctatgaggagaccatgtgccgaggtcgtgtgctaggaagccagttgctgtgagaaatgaccagtgtcatgtctgtctttcagccaccctacatcatgtagcagttcttctgagatc

SEQ ID NO: 82 - DNA, 174 bp, Artificial Sequence
  Description of Artificial Sequence: Synthetic polynucleotide
agccctttgtctgaaggtgctgcgggatgccgttccttcgcgcgtgaggctgcggctctgacgccccataggctccttcaatttccgtgatcctcggagtccccaggagaccaggtgatggcagcagccagactcctgccagtgccggcaggaccccaggccaagctgaccttc

SEQ ID NO: 83 - DNA, 174 bp, Artificial Sequence
  Description of Artificial Sequence: Synthetic polynucleotide
agccgggattgggcagagggcggggcggcggagggattgcggcggcccgcagcgggataaccttgaggctgaggcagtggctccttgcacagcagctgcacgcgccgtggctccggatctcttcgtctttgcagcgtagcccgagtcggtcagcgccggaggacctcagcagcc

SEQ ID NO: 84 - DNA, 174 bp, Artificial Sequence
  Description of Artificial Sequence: Synthetic polynucleotide
agcctgcctgtctgcatggtccgcctagaggtttgagcagctgggcatggaagaagcgagccacacccccatcgcatgccctatgaacgggataagggaactttttcacttcaccactatgcctgactaattttttaattaaaaaaaatttttttgtagaaacagagtttcacc

SEQ ID NO: 85 - DNA, 174 bp, Artificial Sequence
  Description of Artificial Sequence: Synthetic polynucleotide
agcctttttcccagcttccttgcaccatggacagctcccattaagccacctctccatcctggggccaggactcttatgccccattcctgtcaaattgagatttcatccaccattctccaaggacagtgaagttataccctagttccagtgttgggatcagtggcccctctggac

SEQ ID NO: 86 - DNA, 174 bp, Artificial Sequence
  Description of Artificial Sequence: Synthetic polynucleotide
agcggctgcagcatccagccagcttggatgtctggcctgtgagcctggggaaactattattaataatatttactgttgataatattggggaaaacagcccttaactctgaggtttctgctgtgctcctttccaaaacagacttccaggactctgaagaaacagttacaagcagg

SEQ ID NO: 87 - DNA, 174 bp, Artificial Sequence
  Description of Artificial Sequence: Synthetic polynucleotide
agctagtccactaggtgctaatcaaatgctgtgttacaacactgtgaggttttcccagttataagtgtcactattagggttttttttaattgcaaagccaaataaggctgtcaattgcatcatcttaccttatttcttcagattaagtactgtttatagtgggatttttggtgg

SEQ ID NO: 88 - DNA, 174 bp, Artificial Sequence
  Description of Artificial Sequence: Synthetic polynucleotide
agctcctgaggtgtagacgccaactctctctagctcgctagtgggttgcaggaggtgcttacgcatgtttgtttctttgctgccgtcttccagttgctttatctgttcacttgtgccctgactttcaactctgtctccttcctcttcctacagtactcccctgccctcaacaag

SEQ ID NO: 89 - DNA, 174 bp, Artificial Sequence
  Description of Artificial Sequence: Synthetic polynucleotide
agctgctgcggcaccagggctccaagactggccgttcagactgctaggtttagcttcaggggcagcccagggcagtgttgctgcatattgcatggatgaaaggctgaaggctgcctcctcttgcaggctggcttctgagattgcaccttcttctcctgctactcctccaaatct

SEQ ID NO: 90 - DNA, 174 bp, Artificial Sequence
  Description of Artificial Sequence: Synthetic polynucleotide
agcttcgacggccgccattttctttctttcttagctgttagctgagaggaagtctctgaacaggcggcagcggctcttatagtgcaaccatggcagactattcaacagtgcctcccccctcttctggctcagctggtggcggtggtggcggcggtggtggtggaggagttaacg

SEQ ID NO: 91 - DNA, 174 bp, Artificial Sequence
  Description of Artificial Sequence: Synthetic polynucleotide
aggaaaaaacctccaagagagctagggttcctctcagagaggaaagacaggtccttaggtcctcaccctcccgtctccttgcccttgcagttctgggaactggacagattggacaactataacgacacctccctggtggaaaatcatctctgccctgccacagaggggcccctc

SEQ ID NO: 92 - DNA, 174 bp, Artificial Sequence
  Description of Artificial Sequence: Synthetic polynucleotide
aggaagcggaggaaggtgaagtaggaccgaattcctgtgccgaagaggcctgcagtgggagagcaggatgggggctccggaggtggcgcccaggctctgagctaccctaggtctgcagactagcgggcattggccagagacatggcccagccactggccttcatcctcgatgtc

SEQ ID NO: 93 - DNA, 174 bp, Artificial Sequence
  Description of Artificial Sequence: Synthetic polynucleotide
aggaaggtgatgcttaagctgagctctgaggaatgatgaagaatgagctcggcgaagggggtgctggtgtttgatgcagggctcagagatggcctgatatgaaggagtcacgcctcccgcctcccggagctgcccagtggctgccttgtccttcaagtgcaggagctggttcaa

SEQ ID NO: 94 - DNA, 174 bp, Artificial Sequence
  Description of Artificial Sequence: Synthetic polynucleotide
aggaggaagggtcactgctgtctccggaagctcttggctgcaaagagagaggatcccgggtatctccctccttacaaccaccgccacctcctagtgccttagaagccactgacagcccccagggcaggtgagccctgcatctggaataaggatccagaggtctcgttcaggacc

SEQ ID NO: 95 - DNA, 174 bp, Artificial Sequence
  Description of Artificial Sequence: Synthetic polynucleotide
aggcactgtgccaagtattttgcttcgatgatttcacgtcatcttcaaaacaacctcatgagggctgggtcagttagaacctaaacaaactagagacctggttgcaacccctcaggctctgctgatgctgtccccctttgttcctgcagcgtggaccctgccagcagccaggcc

SEQ ID NO: 96 - DNA, 174 bp, Artificial Sequence
  Description of Artificial Sequence: Synthetic polynucleotide
aggccacagtaccctattcacgctctgtgcttgtgccaaggtttcaagtgatcctcccgcctcagcctgcccaggtgctgagattacatgtatgagccactgcacctggaaaggagccagaaatgtgaagtgctagctgaaggatgagcagcagctagccaggcaaagggggca

SEQ ID NO: 97 - DNA, 174 bp, Artificial Sequence
  Description of Artificial Sequence: Synthetic polynucleotide
aggccgcggcccagctgaccctcggggctcccccggcagcggacagggaagggttaaaggcccccggctccctgccccctgccctggggaacccctggccctgtggggacatgaactagggacaaattcccagctgacggggaccacaacctggattccctgcccaccctggcc

SEQ ID NO: 98 - DNA, 174 bp, Artificial Sequence
  Description of Artificial Sequence: Synthetic polynucleotide
aggcgcgggccctggcaggtcctttctcgaggcagggggcacggtagcacagggagcttctctttgtgggcgggcgcgaggcccgctagggggttatactggggaacgtgcctgcgcgtgcttggatagttcatttaaagcccccatccctgcaaggtggtgctttctaccaat

SEQ ID NO: 99 - DNA, 174 bp, Artificial Sequence
  Description of Artificial Sequence: Synthetic polynucleotide
agggaggaggaaggatgggcggtgttggcgtagccgcagggaggtgactgaagcgagcctggcctcttgcatcctccgcctgtgtacctccctcccctttttttccgccttctgccagcagaagcagcagccgcagcacctgagccgctactgccgctcactcaggacaacgct

SEQ ID NO: 100 - DNA, 174 bp, Artificial Sequence
  Description of Artificial Sequence: Synthetic polynucleotide
aggggcactgctctgtccgagtgctgcccttggggcgaggcgggcatgtggctctacaaggtggagtccaggcggccaaagtttggaaaggactttccttatcccagttgattgtgcagaatacactgcctgtcgcttgtcttctattcaccatggcttcttctgatatccagg

SEQ ID NO: 101 - DNA, 174 bp, Artificial Sequence
  Description of Artificial Sequence: Synthetic polynucleotide
agggggacactatttctggtactcccaggaggctgcgggtcgatgctcgtgccagcctgggacccaggcagcacggtttctctcccaaattgtgccagagaacacgcacgtcctggttttcattgttccccgcctcctgcgactcgtttgtggttaaaattataagacctaatt

SEQ ID NO: 102 - DNA, 174 bp, Artificial Sequence
  Description of Artificial Sequence: Synthetic polynucleotide
agggtgtcccaagccccttgggtcgcgtatctggctggatccagcctctccgcatcttgatcttttcccctcttctaggaggcatccctacaccctatgactacaggcctgattctcttctttcagtcagggcgacccttgggcgctggagtacgcttgggactggggctgcga

SEQ ID NO: 103 - DNA, 174 bp, Artificial Sequence
  Description of Artificial Sequence: Synthetic polynucleotide
agtaggacaatatgagactctggggcagtgaaagacttaccaggattccttctggaactgactcgtcagctcattcatgtcttacccagtctttaaacagtatttcatgataatggtctgcttttaattgctgggctttaccttaccctttttgtgattgcaggtcctacaggt

SEQ ID NO: 104 - DNA, 174 bp, Artificial Sequence
  Description of Artificial Sequence: Synthetic polynucleotide
agtaggagtggagagcgtgcgtgagtgagtgtgtgtgtgtgtgtgtgtgtgtgtgcatgcgtgtgtgaagaatgcacactatctcctgttggtaagtgtgtgcttactccctgaccagatgctgcggtgcacggggcagccaccatctctgcatgcatgtctgtgatgtcttcc

SEQ ID NO: 105 - DNA, 174 bp, Artificial Sequence
  Description of Artificial Sequence: Synthetic polynucleotide
agtatgcaggtcgctgcagggacccgaggcgacacgcgcctgcaggaggtggcactcctgccgcagctcttcgatctgcttgtccttggccagcggcgcgctcgcctgctccgacaggtcccgagcgcgctggcgggcaaagacttggcacagctccaggccggcgcaactctc

SEQ ID NO: 106 - DNA, 174 bp, Artificial Sequence
  Description of Artificial Sequence: Synthetic polynucleotide
agtcacttctgttcatttttaatgaaaacctattgctgttattttctattatgagttaacggtgatgtgtgttttttaaattttgtatacttgctctcaccctaaaatataccttaagagacttttcccctgtttttctttctgctttccaagactccaggaaaaacagcttcc

SEQ ID NO: 107 - DNA, 174 bp, Artificial Sequence
  Description of Artificial Sequence: Synthetic polynucleotide
agtcatccccaaaacgaggggatatcagcttaccgaggccgcaggttttcctagtccctacctcatagatatgtaggacatccccgggcccggaatgcggctctctgaccctctctgtgccctcccccgccccccgaaccaggcttggcgggcggaggcgccagcggatgtctc

SEQ ID NO: 108 - DNA, 174 bp, Artificial Sequence
  Description of Artificial Sequence: Synthetic polynucleotide
agtccgtggatctcacaaaaatgtttgctgacccttgacattgacaaactgctgacagctcagatgatccatgattggaaggatgtggtcatcaccaagatgtctttctttctccggttcccagttttccagacctgaagtgttttccaatcaaagcgaagagacgatctgtgg

SEQ ID NO: 109 - DNA, 174 bp, Artificial Sequence
  Description of Artificial Sequence: Synthetic polynucleotide
agtgccgccactggaaccaggagatgcggcgcaggagctgtcgctgtgtttgctttaacctgagtcttgttccttattgtggttcctgctgtggttttgatcatgttgttaccctcggacgtagcccggcttgtattgggttacttacagcaagaaaacctcatttctacctgc

SEQ ID NO: 110 - DNA, 174 bp, Artificial Sequence
  Description of Artificial Sequence: Synthetic polynucleotide
agtgtcctggttactgcagcggcagcaacagcaggtcctactatcgcctccctctagtctctgcttctctggatccctgaggagggcagaaggaagaaaacagcccaaagatgagagtgattcgcgtgggtacccgcaagagccagcttgctcgcatacagacggacagtgtgg

SEQ ID NO: 111 - DNA, 174 bp, Artificial Sequence
  Description of Artificial Sequence: Synthetic polynucleotide
agttcacccaatggacctgcctactgcagcgtaggcctcgcctcaacggcaggagagcaggcggctgcggttgctgcagccttcagtctccacccggactacgccatgttggggtttgtgggtcgggtggccgctgctccggcctccggggccttgcggagactcaccccttca

SEQ ID NO: 112 - DNA, 174 bp, Artificial Sequence
  Description of Artificial Sequence: Synthetic polynucleotide
agttctcaggctcacattcccaccacccacctctgagcccagccctccctagcatcaccacttccatcccattcctcagccaagagccaggaatcctgattccagatcccacgcttccctgcctccctcaggtcccagctcttgctcctgcctgtttgcctggaaatggccacg

SEQ ID NO: 113 - DNA, 174 bp, Artificial Sequence
  Description of Artificial Sequence: Synthetic polynucleotide
agttgccctgtcagtgcaggtggaggccccggcggggcaaagtggcaggaacctcttaaagggcgagagcggcgcggagccagaacgcggtcggcccggtccccgccgcacccagcccagcaacatcatgacaacagagaagagtttagtgactgaggccgaaaattcacagca

SEQ ID NO: 114 - DNA, 174 bp, Artificial Sequence
  Description of Artificial Sequence: Synthetic polynucleotide
agtttgcttggagctcctggggcctaacaaaaagaaacctgccatgctgctcttcctcctctctgcactggtcctgctcacacagcccctgggctacctggaagcagaaatgaagacctactcccacagaacaatgcccagtgcttgcaccctggtcatgtgtagctcagtgga

SEQ ID NO: 115 - DNA, 174 bp, Artificial Sequence
  Description of Artificial Sequence: Synthetic polynucleotide
ataaaccgacgtttagccagaccatcttgattcaaaacatctatcgtaatccccaaaacagtgcacagacggctgacggctcacactaccattgccctcttgaacatttaccgtaaccctcaaaactcttcccagtctgctgacggtttgcgctgtgccgtgagcgatgtggag

SEQ ID NO: 116 - DNA, 174 bp, Artificial Sequence
  Description of Artificial Sequence: Synthetic polynucleotide
ataggccccgcccctgtatcccaagaccctgcctcctcttgcggtggggggaaagcggcctcttactctaggcctttcggtttgcgcgagcgggcaggaaagcgtgcgtgcggctaagagagtgggcgctctcgcggccgctgacgatggaagaactggagcaaggcctgttga

SEQ ID NO: 117 - DNA, 174 bp, Artificial Sequence
  Description of Artificial Sequence: Synthetic polynucleotide
atcagcccaaaggtaggctcaggctccgacggtggccggcgggggtcacgaggcttcgtagtggaggaacgggtttggcgtgtgggacgcagctgcctctgtactggggagtcacggagtggccgggctccagggacatggcggcggcctctgcggtgtcggtgctgctggtgg

SEQ ID NO: 118 - DNA, 174 bp, Artificial Sequence
  Description of Artificial Sequence: Synthetic polynucleotide
atccaggtctctgtgctccacacttgtctttcgtgctccatgtttgaagaaattaatattgtggaagaacagttttaaggcttagaggaacttgagttaggatccgtacttggcagatgaggaaattgattctcatggatgtaaattcactgtttgaggccacaacagggcatc

SEQ ID NO: 119 - DNA, 174 bp, Artificial Sequence
  Description of Artificial Sequence: Synthetic polynucleotide
atccatttgttctcaagaggtagcaagaaacagtatccacagtggactccggggctcctacagacttggcacagcttcctacagtcttgaaacagccctgttgttctgtcatggccagtgggcagtttgtgaacaaactgcaagaggaagtgatctgccccatctgcctggaca

SEQ ID NO: 120 - DNA, 174 bp, Artificial Sequence
  Description of Artificial Sequence: Synthetic polynucleotide
atcccagcagactgtgcagtggggcaaggatttcatgagcatcctcctctaaacgcgtgtcaagacaaaagatgcttcagctttggaaacttgttctcctgtgcggcgtgctcactgggacctcagagtctcttcttgacaatcttggcaatgacctaagcaatgtcgtggata

SEQ ID NO: 121 - DNA, 174 bp, Artificial Sequence
  Description of Artificial Sequence: Synthetic polynucleotide
atcccagccgccagaattcgaggtctgcggcggctttcaaaacttgacaactttcctttccaggaggaccccgttctggagcgttatttcaaaggccacaaagctgcgatcacctccttggacctcagccccaacggcaagcaacttgctactgcttcttgggatacctttctc

SEQ ID NO: 122 - DNA, 174 bp, Artificial Sequence
  Description of Artificial Sequence: Synthetic polynucleotide
atccggcgcggtgtttagactccactgatgtcgtggcgctttaggggaagaagttggtgtttcgctgggccctggtactgaagacggggtccgggtcgcccctagctgtttcctactcacccaaagccccgcacccgccttttctctctctcctctggcaggatgaggcgtgca

SEQ ID NO: 123 - DNA, 174 bp, Artificial Sequence
  Description of Artificial Sequence: Synthetic polynucleotide
atccgggcaggataaaggcctgggtgaggcggctcacctaccctgctttctgcattcttctctccacatccctctctgtacttacagcccccaatggcccccaaaaagccagagcccaagaaggatgatgccaaggcagcccccaaggcagctccagctcccgcacctccccct

SEQ ID NO: 124 - DNA, 174 bp, Artificial Sequence
  Description of Artificial Sequence: Synthetic polynucleotide
atcctgatttaaacgtcagtagataagtgtattttattgatagaagatgttgaatttcttctgttcacttgcttttaaaaaagataaaccccacttgaaaaactgaggtgcttaaggagtaaaataatatgttcctggtggcatcctccagatcgtactgagaagcactccaca

SEQ ID NO: 125 - DNA, 174 bp, Artificial Sequence
  Description of Artificial Sequence: Synthetic polynucleotide
atcgctacgcccacttggtggcctataaaggaagcgggcgaaccccggcagccctacacaacttggggcccctctcctctccagcccttctcctgtgtgcctgcctcctgccgccgccaccatgaccacctccatccgccagttcacctcctccagctccatcaagggctcctc

SEQ ID NO: 126 - DNA, 174 bp, Artificial Sequence
  Description of Artificial Sequence: Synthetic polynucleotide
atctagagaaacatctgtagcatcaatgagtcagacaagcggtggtgaggcaggctcgcctcctccagctgttgttgctgctggatttgcctctgaagcagggagtgtctgcattaaaaatgacctgtagttctctgcttcatagatgcttcttcagctccctcctcttcctcc

SEQ ID NO: 127 - DNA, 174 bp, Artificial Sequence
  Description of Artificial Sequence: Synthetic polynucleotide
atcttatccaggacgcttcattgcatttggtcttcatttctccttagtctcctccaggctgacatttcctcaatctttattggtcttccacagccctgacacttttggagataccagtcagcatttccaagttcgttctgtgagactgtagtgtcaggacaaagcaacaacaaa

SEQ ID NO: 128 - DNA, 174 bp, Artificial Sequence
  Description of Artificial Sequence: Synthetic polynucleotide
atctttttataaaaaacccagtctttgctgaccagacaaagcataccagatctcaccagagagtcctaggggactacagaaggaaaaagacaagaggcagtaggatatctgtgtgtcctcccgctgaccacacttcctttagtgacccgattgcctcctcaagtcgcagacact

SEQ ID NO: 129 - DNA, 174 bp, Artificial Sequence
  Description of Artificial Sequence: Synthetic polynucleotide
atgaaccacacaatggtcacagagtttgtcctcctgggcctttctgatgatcctgaccttcagattgtgatttttctctttttatttatcacgtatatattaagtgttactggaaacctgactatcatcaccctaacctttgtggactcccatctgcagacacctatgtatttc

SEQ ID NO: 130 - DNA, 174 bp, Artificial Sequence
  Description of Artificial Sequence: Synthetic polynucleotide
atgacagagaaattccttttcctttatctttccctccttcccatgcccctactctcacaggcacagtggaatgaaaattcccttgtcagtttttccaaaataattgcttcgggaaaccatctaagcaactgttggatctgccacaacttcatcaccaggtcctcatcttaccaa

SEQ ID NO: 131 - DNA, 174 bp, Artificial Sequence
  Description of Artificial Sequence: Synthetic polynucleotide
atgagaaattccacagcagtaacagactttattcttcttggattgacaagtgacccacagtggcaggttgtacttttcatatttcttcttgttacctacatgttaagtgtgactgggaacctgatcattatcaccctcaccctttcagatccccatctgcagactcccatgtat

SEQ ID NO: 132 - DNA, 174 bp, Artificial Sequence
  Description of Artificial Sequence: Synthetic polynucleotide
atgccccaaattcttatattcacatacctgaatatgttttacttctttccccctttgcagatcttggcagaaaacctcaccatggtcaccgaattcctgttgctgggtttttccagccttggtgaaattcagctggccctctttgtagtttttctttttctgtatctagtcatt

SEQ ID NO: 133 - DNA, 174 bp, Artificial Sequence
  Description of Artificial Sequence: Synthetic polynucleotide
atgccgatgcagctgctgcttacagattttattatcttttccatcagattcatcatcaacagcatggaagcgagaaaccaaacagctatttcaaaattccttctcctgggactgatagaggatccggaactgcagcccgtccttttcagcctgttcctgtccatgtacttggtc

SEQ ID NO: 134 - DNA, 174 bp, Artificial Sequence
  Description of Artificial Sequence: Synthetic polynucleotide
atgcggcgaggtcctgctgcgtgagccattgacgtgtttggagctggagacggcctgggtgctggcgaagcggaggccggagtaagaagactgttagaatgccctcggtaacacagaggctgagagatcctgacataaatccttgtttgtcggaatctgatgcttccaccagat

SEQ ID NO: 135 - DNA, 174 bp, Artificial Sequence
  Description of Artificial Sequence: Synthetic polynucleotide
atgcggctggccaaccagaccctgggtggtgactttttcctgttgggaatcttcagccagatctcacaccctggccgcctctgcttgcttatcttcagtatatttttgatggctgtgtcttggaatattacattgatacttctgatccacattgactcctctctgcatactccc

SEQ ID NO: 136 - DNA, 174 bp, Artificial Sequence
  Description of Artificial Sequence: Synthetic polynucleotide
atgctcttgatttgaatcggaggctgctgtgaaaagggatgcagcttctgctagccactgtgaacttctgaatctcactagggttgggtctgctttggggcactcagataaccccagtatttccaaaccagctttcccttttgcttcaggacatatcttacccaagcctgcact

SEQ ID NO: 137 - DNA, 174 bp, Artificial Sequence
  Description of Artificial Sequence: Synthetic polynucleotide
atgcttcttccatgattttttgaatctagactgggctgttctctgtgttaaaccaatcagttgcgaccttctcttaacagtgtgaagtgagggggtctctctccctccttctccttcctctgtgattcaccttcctttttaccctgccctgcggcggctccgccccttaccttc

SEQ ID NO: 138 - DNA, 174 bp, Artificial Sequence
  Description of Artificial Sequence: Synthetic polynucleotide
atggaagaggaaaatgcaacattgctgacagagtttgttctcacaggatttttatatcaaccacagtggaaaatacccctgttcctggcattcttggtaatatatctcatcaccatcatggggaatcttggtctgattgctgtcatctggaaagaccctcaccttcatatccca

SEQ ID NO: 139 - DNA, 174 bp, Artificial Sequence
  Description of Artificial Sequence: Synthetic polynucleotide
atggacaacccacaggctctgccactcttcctactcctggcctccttggtagggatcctcaccctcagagcctcttctggacttcagcaaaccaacttctcctctgccttctcttcagactcaaagagctcttcccaggggctgggtgtggaagttccctccatcaaacctccc

SEQ ID NO: 140 - DNA, 174 bp, Artificial Sequence
  Description of Artificial Sequence: Synthetic polynucleotide
atggacacagggaactggagccaggtagcagaattcatcatcttgggcttcccccatctccagggtgtccagatttatctcttcctcttgttgcttctcatttacctcatgactgtgttgggaaacctgctgatattcctggtggtctgcctggactcccggcttcacacaccc

SEQ ID NO: 141 - DNA, 174 bp, Artificial Sequence
  Description of Artificial Sequence: Synthetic polynucleotide
atggagccccaaaatacctccactgtgactaactttcagctgttaggattccagaaccttcttgaatggcaggccctgctctttgtcattttcctgctcatctactgcctgaccattatagggaatgttgtcatcatcaccgtggtgagccagggcctgcgactgcactcccct

SEQ ID NO: 142 - DNA, 174 bp, Artificial Sequence
  Description of Artificial Sequence: Synthetic polynucleotide
atggcaacggtgaacacagatgccacagataaagacatatccaagttcaaggtcaccttcactttggtggtctccggaatagagtgcatcactggcatccttgggagtggcttcatcacggccatctatggggctgagtgggccaggggcaaaacactccccactggtgaccgc

SEQ ID NO: 143 - DNA, 174 bp, Artificial Sequence
  Description of Artificial Sequence: Synthetic polynucleotide
atggcaagggagaattcgaccttcaactccgacttcatcctcctgggaatcttcaatcacagccccacccacaccttcctcttctttctggtcctggccatcttttcagtggccttcatgggaaactctgtcatggttctcctcatctacctggacacccagctccacaccccc

SEQ ID NO: 144 - DNA, 174 bp, Artificial Sequence
  Description of Artificial Sequence: Synthetic polynucleotide
atggcatgggagaatcagaccttcaactctgacttcatcctcctgggaatcttcaatcacagccccacccacaccttcctcttctttctggtcctggccatcttttcagtggccttcatgggaaactctgtcatggttctcctcatctacctggacacccagctccacaccccc

SEQ ID NO: 145 - DNA, 174 bp, Artificial Sequence
  Description of Artificial Sequence: Synthetic polynucleotide
atggctgaagaaaatcataccatgaaaaatgagtttatcctcacaggatttacagatcaccctgagctgaagactctgctgtttgtggtgttctttgccatctatctgatcaccgtggtggggaatattagtttggtggcactgatatttacacaccgtcggcttcacacacca

SEQ ID NO: 146 - DNA, 174 bp, Artificial Sequence
  Description of Artificial Sequence: Synthetic polynucleotide
atggggcctttgttcaccaccattcctggtgcccattctggtcccatgcgtcctctgcccaagaaacacgtagaacccatggcagtgcgacagctgcttcttggcaactccaccatgatcaggcacacttgtcccatgtctgtcccgttgagccggcaagtcaaggaagttgct

SEQ ID NO: 147 - DNA, 174 bp, Artificial Sequence
  Description of Artificial Sequence: Synthetic polynucleotide
atggtgactgaattcatttttctgggtctctctgattctcaggaactccagaccttcctatttatgttgttttttgtattctatggaggaatcgtgtttggaaaccttcttattgtcataacagtggtatctgactcccaccttcactctcccatgtacttcctgctagccaac

SEQ ID NO: 148 - DNA, 174 bp, Artificial Sequence
  Description of Artificial Sequence: Synthetic polynucleotide
atggtgagggagaatcagaccttcaactccgacttcatcctccttggaatcttcaatcacagcccaccacacacgttcctcttctttctggtcctgggcatctttttagtggccttcatgggaaactctgtcatggttctcctcatctacctggacacccagctccacaccccc

SEQ ID NO: 149 - DNA, 174 bp, Artificial Sequence
  Description of Artificial Sequence: Synthetic polynucleotide
atgtgcactgagggtgacacttctgagtgtgggggccctggctagggagtgggactggcaggcttgggtggggttcccaagctttaatcttcctaccccacagaatgttttctctgcccttcaggcagcctgagccgggcagggcccctgcctctgctacggcagcccccgatc

SEQ ID NO: 150 - DNA, 174 bp, Artificial Sequence
  Description of Artificial Sequence: Synthetic polynucleotide
atgttctcaatgacaacagaagcactcaataattttgcacttggatgtaccaacttgttaatgactatgataccacaaattgatctgaagcaaattttcctttgtcctaattgcagactatacatgatccctgttggagctttcatcttttccttgggaaacatgcaaaaccaa

SEQ ID NO: 151 - DNA, 174 bp, Artificial Sequence
  Description of Artificial Sequence: Synthetic polynucleotide
attcagccccgtgctcagcagacatcagggatcaccgactctgtgccaggagctgttcttgatgctgggaacgcaggggtggacaaaacagagaaagccctgccctcagtgagaaatatgctgtcatgtaaattgctttttcccctatagaatgccagcagttactctgcagag

SEQ ID NO: 152 - DNA, 174 bp, Artificial Sequence
  Description of Artificial Sequence: Synthetic polynucleotide
attcttcccctctctacaaccctctctcctcagcgcttcttctttcttggtttgatcctgactgctgtcatggcgtgccctctggagaaggccctggatgtgatggtgtccaccttccacaagtactcgggcaaagagggtgacaagttcaagctcaacaagtcagaactaaag

SEQ ID NO: 153 - DNA, 174 bp, Artificial Sequence
  Description of Artificial Sequence: Synthetic polynucleotide
attggctgagcccggctgtcagtcctttcgcgcctcggcggcgcggcatagcccggctcggcctgtaaagcagtctcaagcctgccgcagggagaagatggcggtcgccgtgagaactttgcaggaacagctggaaaaggccaaagagagtcttaagaacgtggatgagaacat

SEQ ID NO: 154 - DNA, 174 bp, Artificial Sequence
  Description of Artificial Sequence: Synthetic polynucleotide
attgggctgagtcggagacttcctttcctgattggccgtgttgtacggcggcttctcgcgcagctgatgacctggaagtgatgcctaaagctgtggaccgcgtgggctcgcctccctgggactaggtttcagcggccgctgcgatgaccaaaataaaggcagatcccgacgggc

SEQ ID NO: 155 - DNA, 174 bp, Artificial Sequence
  Description of Artificial Sequence: Synthetic polynucleotide
atttctttataaaccacaactctgggcccgcaatggcagtccactgccttgctgcagtcacagaatggaaatctgcagaggcctccgcagtcacctaatcactctcctcctcttcctgttccattcagagacgatctgccgaccctctgggagaaaatccagcaagatgcaagc

SEQ ID NO: 156 - DNA, 174 bp, Artificial Sequence
  Description of Artificial Sequence: Synthetic polynucleotide
caaaaggcttccctctgtgtgttgcagtcctgtggcattatgcatgccccctcccagtgaccccaggctttttatggctgtgagacacgttaaaatttcaggggtaagacgtgaccttttgaggtgactataactgaagattgctttacagaagccaaaaaaggtttttgagtc

SEQ ID NO: 157 - DNA, 174 bp, Artificial Sequence
  Description of Artificial Sequence: Synthetic polynucleotide
caacagaagccaagaaggaagccgtctatcttgtggcgatcatgtataagctggcctcctgctgtttgcttttcataggattcttaaatcctctcttatctcttcctctccttgactccagggaaatatcctttcaactctcagcacctcatgaagacgcgcgcttaactccgg

SEQ ID NO: 158 - DNA, 174 bp, Artificial Sequence
  Description of Artificial Sequence: Synthetic polynucleotide
caactggaggcaaagagggttgctcaacgccccgcctcattggaaaaccaaatcagatctgggacctatatagcgtggcggaggcggggcgatgattgtcgcgctcgcacccactgcagctgcgcacagtcgcatttctttccccgcccctgagaccctgcagcaccatctgtc

SEQ ID NO: 159 - DNA, 174 bp, Artificial Sequence
  Description of Artificial Sequence: Synthetic polynucleotide
caattgtgcatgtcggactcggcgcccagcgcccaagcgctaacccgctgaaagtttctcagcgaaatctcagggacgatctggaccccgctgagaggaactgcttttgagtgagatggtcccagaggcctggaggagcggactgcaagccccgcccaacacggactggcgttt

SEQ ID NO: 160 - DNA, 174 bp, Artificial Sequence
  Description of Artificial Sequence: Synthetic polynucleotide
cacagccatcttgggatctgggcaagtgagcgagctccttcctcaccgggctgactagcctctcctttccctgtccccctccatcgctgctctgcaggaagccagcccccagggccagtcccggaggggctgatccgcatctacagcatgaggttctgcccctattctcacagg

SEQ ID NO: 161 - DNA, 174 bp, Artificial Sequence
  Description of Artificial Sequence: Synthetic polynucleotide
cacatgcgcaccgcagcgggtcgcgcgccctaaggagtggcactttttaaaagtgcagccggagaccagcctacagccgcctgcatctgtatccagcgccaggtcccgccagtcccagctgcgcgcgccccccagtcccgcacccgttcggcccaggctaagttagccctcacc

SEQ ID NO: 162 - DNA, 174 bp, Artificial Sequence
  Description of Artificial Sequence: Synthetic polynucleotide
caccattgaatcccagtcctaacagaagtactgcgaatcttgtggcctcattctgaacaaaagggattagagaagaaaaatctcttgatataaggcttgaaagcaagggcaggcaatcttggttgtgaatattttctgatttttccagaaatcaagcagaagattgagctgctg

SEQ ID NO: 163 - DNA, 174 bp, Artificial Sequence
  Description of Artificial Sequence: Synthetic polynucleotide
caccctacagcagttcaggctgtgtggttcgcaggaagcatacactggctttttgattcttgctagttcccagctcacagtttgggaggatccaacaccaacctttacgtgaagtggaggcccaaggacagtgaggagctgggtggtcccagcctggagctgtgccagcctgac

SEQ ID NO: 164 - DNA, 174 bp, Artificial Sequence
  Description of Artificial Sequence: Synthetic polynucleotide
caccctcgcgatctgtcaagtctgtccccaggggaggtccccctttcgggaggaagtttttaaggggatttctcaaaatcacccccgcgcttccttcactccttccttagagccggaggtcggtgagggcccgcggaatcatctatctcgcccccgtcgcagcgcgcagggacc

SEQ ID NO: 165 - DNA, 174 bp, Artificial Sequence
  Description of Artificial Sequence: Synthetic polynucleotide
cacccttctcctcctccgcccagtactcgtggccagggtcgtatcagttctccgtcaacttgcttggggccttggacgagcctcctggcgcttcctgtcagtggcgaaaagctgctttgctccccctgtggatgtaaccccttagctggcattttgcatctcaattggcttgtg

SEQ ID NO: 166 - DNA, 174 bp, Artificial Sequence
  Description of Artificial Sequence: Synthetic polynucleotide
caccgcaggctcctgtgccttgggcttgagctttgtggcagttaatggcttttctgcacgtatctctggtgtttacttgagaagcctggctgtgtccttgctgtaggagccggagtagctcagagtgatcttgtctgaggaaaggccagccccacttggggttaataaaccgcg

SEQ ID NO: 167 - DNA, 174 bp, Artificial Sequence
  Description of Artificial Sequence: Synthetic polynucleotide
cacgtgtcagtgcctgaggcagagactgcgagaaaaaaacgcgcttcattccttcttccaccgccatactgtattttatactaaatctcatttttattccaacattttactcccgctcgatatagcccttggcgaggtgcctggctccatagattaaagcaaggagagccaatc

SEQ ID NO: 168 - DNA, 174 bp, Artificial Sequence
  Description of Artificial Sequence: Synthetic polynucleotide
cacgttcttatgtaaccgagcccgggtaaagcagggctgcagaaagcagaaacggcgagcccggctcctgggagcaggtctcggcccccgcttggggccccggccgtgcggccggagggagcggccggatggagcggaggatgaaagccggatacttggaccagcaagtgccct

SEQ ID NO: 169 - DNA, 174 bp, Artificial Sequence
  Description of Artificial Sequence: Synthetic polynucleotide
cactgacgggcacttgcaccgtgtggacagactctccggttctggggaaatccagtccctgttactccattttggccagaaattcaagacatttcaggtggcagaataaattcaatccttgtttctccatcttatcgagtagtagaagttagttacattctctttgaactcatc

SEQ ID NO: 170 - DNA, 174 bp, Artificial Sequence
  Description of Artificial Sequence: Synthetic polynucleotide
cactgtctgaaacagtcgcgtaaggggtcgccactgggacactgtgaaccaggagtgagtcggagctgccgcgctgcccaggccatggactgtgaggtcaacaacggttccagcctcagggatgagtgcatcacaaacctactggtgtttggcttcctccaaagctgttctgac

SEQ ID NO: 171 - DNA, 174 bp, Artificial Sequence
  Description of Artificial Sequence: Synthetic polynucleotide
cactgttggtaaagcccagcccttcccaacctgcaagctcaccttccaggactgggcccagcccatgctctccatatataagctgctgccccgagcctgattcctagtcctgcttctcttccctctctcctccagcctctcacactctcctcagctctctcatctcctggaacc

SEQ ID NO: 172 - DNA, 174 bp, Artificial Sequence
  Description of Artificial Sequence: Synthetic polynucleotide
cagaggagcacgaggatcgtgggagctaagaatagcaggacccagtgctccataaaggataatagtttccagtacactatccctcatgatgactccttaagtggttcatcgtctgcatcttcgtgtgaaccagtgagtgattttccagcatctttccgaaaatctacctactgg

SEQ ID NO: 173 - DNA, 174 bp, Artificial Sequence
  Description of Artificial Sequence: Synthetic polynucleotide
cagcatgttcgagctcattcctctccagcttctctgcagttgggagctgtttctcctgggacactgacccccactggagtagtctctggcccagcagctacacccacagctcagcatcttcgacagtcttcttttgagatacctgatgatgtacctctgccagcaggttgggag

SEQ ID NO: 174 - DNA, 174 bp, Artificial Sequence
  Description of Artificial Sequence: Synthetic polynucleotide
cagccaatcacaagccgggctgtgctcctacaccatccgaagagcgaatcgtgcagagaccgtgtctacgattggcctctccctgacaaggatttaattttgaatttttctttatggcgtgggagaggccacagcccggactccatcgactcccccggctcttagactaaaatc

SEQ ID NO: 175 - DNA, 174 bp, Artificial Sequence
  Description of Artificial Sequence: Synthetic polynucleotide
cagcccgcgtctctctgacagcagcaggggctgggtttaagcagcggctgctttgcctggggagcacccgtaaatggactttggtctcaatgctttgactctttgccgtggttttggatgttggaataccggcggtgatctgtcttttataaactcacctgatttaaaggaaag

SEQ ID NO: 176 - DNA, 174 bp, Artificial Sequence
  Description of Artificial Sequence: Synthetic polynucleotide
cagccctgacgcttccttggggccacttccttctttttttcctagcaacggcgggtagcgtttttgacatcccgggaggctgtgccgccggcctgagcccagagtttcgcggcctccgcgatggcagaggtggaggaaaccttaaagaggatccagagtcataaaggggttatt

SEQ ID NO: 177 - DNA, 174 bp, Artificial Sequence
  Description of Artificial Sequence: Synthetic polynucleotide
cagctcattctggatgaatgaatgattacactaagtgtcctccacattcctctgtgggctcacttcatggactcactttgcgtgcttgttaaatgtgctgtgttgctcccaagaccatgtaaagcctactgaccactaacctccctcacagcagaaactagacgtcaggttaaa

SEQ ID NO: 178 - DNA, 174 bp, Artificial Sequence
  Description of Artificial Sequence: Synthetic polynucleotide
caggccactctcctgtgcctgccagaagagacagagcttgaggagagcttgaggagagcaggaaagcagcctcccccgttgcccctctggatccactgcttaaatacggacgaggacagggccctgtctcctcagcttcaggcaccaccactgacctgggacagtgaatcgaca

SEQ ID NO: 179 - DNA, 174 bp, Artificial Sequence
  Description of Artificial Sequence: Synthetic polynucleotide
caggccggggttactgtggcgaccacgagagcagctttggcgctatggaggagcccggggttacccctcaaccgtatttggggctgctcctggaggagctacgcagggttgtggcagcactgcctgaaggttaggagtcggctttatgtgggacgagagaaaaagcttgctcta

SEQ ID NO: 180 - DNA, 174 bp, Artificial Sequence
  Description of Artificial Sequence: Synthetic polynucleotide
caggcctccatctccaggtccctctccgaggcttcctcgctgccagctgagtcgtgggcacctgagggactacctaccactgctcccggctgtgccatcgccaccagctcccagcctcctgctcagacccgggacagcccctccatggcccccgagatggaccagttttacagg

SEQ ID NO: 181 - DNA, 174 bp, Artificial Sequence
  Description of Artificial Sequence: Synthetic polynucleotide
caggtctgggctcttcagctgagcacttagtgtttgtacaggatgaggcagaagattcagggaatgatttcctctccagtgagagcacagacagtagcattccatggttcctccgggttcaggagttggcccatgacagtttgattgctgctactcgtgcacaactggcaaaga

SEQ ID NO: 182 - DNA, 174 bp, Artificial Sequence
  Description of Artificial Sequence: Synthetic polynucleotide
cagtatgaggcaagcgcagggggacggggaccagcagctgtcgccgccgctctcaggctctgggaaccacccttctactttctgtctctaggaatttcactactctagggtgaagagggaacagaaatctttgccccctgactttggaaatctcgtttaaccttcaaactggcg

SEQ ID NO: 183 - DNA, 174 bp, Artificial Sequence
  Description of Artificial Sequence: Synthetic polynucleotide
catatgggtgattggtacagtaggtttataaacagaagtttaaacttgtaagcttaagcttccgtttataaacagaagtttaaaattataggtcctgtttaacattcagctctgttaactcactcatctttttgtgtttttacactttgtcaagatttctttacatattcatca

SEQ ID NO: 184 - DNA, 174 bp, Artificial Sequence
  Description of Artificial Sequence: Synthetic polynucleotide
catcgcgtcagtacttatggcgcctgccgggttgtggtgacgaaagcagttgccatggagttgctctgagtaaccctgaggcagtgggacgccaagactggagaggaagcgactgcggggagtatttccattttaaccggaaacaatccctgaacccacaggaatgaatgccta

SEQ ID NO: 185 - DNA, 174 bp, Artificial Sequence
  Description of Artificial Sequence: Synthetic polynucleotide
catcggcgctttgccacttgtacccgagtttttgattctcaacatgtccgagactgctcctgccgctcccgctgccgcgcctcctgcggagaaggcccctgtaaagaagaaggcggccaaaaaggctgggggtacgcctcgtaaggcgtctggtcccccggtgtcagagctcat

SEQ ID NO: 186 - DNA, 174 bp, Artificial Sequence
  Description of Artificial Sequence: Synthetic polynucleotide
catctccggccatactgccagccgcgttagccttgcctgaccgtcgcgctcggaaagaaacccccgcaactctaccacagaaaatcgagagccttggttacaaccgacttatcctgcaaattggtagaggaacggtggtacctgaacccttcagtactgagtcgtttactctgg

SEQ ID NO: 187 - DNA, 174 bp, Artificial Sequence
  Description of Artificial Sequence: Synthetic polynucleotide
catttggggagaatgagggagaaaagaacgggcattccgagccaagagcactgcatgagcaaggagttgggaggttgcttacttgttgaacatatttgttgcgtatttgcatatttgctaaacaggttttcgtaacaccccagggcctgtaaggtttggtgtttccctttcaag

SEQ ID NO: 188 - DNA, 174 bp, Artificial Sequence
  Description of Artificial Sequence: Synthetic polynucleotide
ccaaacaaacttgaagatctcacagacctaatagacacggcctttcctctctgcctctggctttatgtctctttcatcctcctctgcctttcccctgcccttgatcccttctgcaggtcttggctggtttcaggaaacgggtcccatcccatggactcccactctggggagcct

SEQ ID NO: 189 - DNA, 174 bp, Artificial Sequence
  Description of Artificial Sequence: Synthetic polynucleotide
ccaagccagatcagcattgttctgaccctactaagtccaaaaccttttgaggccagaccttgtttcaactccaaagcctgctaggttccagcaccccccgcatccctcctcataccacccccttctcccccctatggaaaccgcttgcttatttttcaaacaggccaagtcatt

SEQ ID NO: 190 - DNA, 174 bp, Artificial Sequence
  Description of Artificial Sequence: Synthetic polynucleotide
ccacctgtgccgccctgccttgttacctggaagcacagccttggggactgagcaggccctcactgtcactttaagaagggaatcagccactttgtgctcaccacctctggggaaggtgtgagaggagagaaggaagtggctgtttggctgctgacaacatgaagacttcctgcg

SEQ ID NO: 191 - DNA, 174 bp, Artificial Sequence
  Description of Artificial Sequence: Synthetic polynucleotide
ccagggcgagtgacaggcgagccctatgctttacttccgagggcggtgtcagcaaagctagagtcagaggttccggttgagatcaagttgggagacacacccttgttcattctccttgagaagcagctattatcaacagaacattgacagaacctgtgtttggggaaaggactg

SEQ ID NO: 192 - DNA, 174 bp, Artificial Sequence
  Description of Artificial Sequence: Synthetic polynucleotide
ccagggctggaatggggccgcccggctccccatggcagtgggtgacgctgctgctggggctgctgctccctcctgccgcccccttctggctcctcaatgtgctcttccccccgcacaccacgcccaaggctgagctcagtaaccacacacggcccgtcatcctcgtgcccggct

SEQ ID NO: 193 - DNA, 174 bp, Artificial Sequence
  Description of Artificial Sequence: Synthetic polynucleotide
ccatgcactgagctggggacatgcaacaataacaggccatacaatgaaagtcgctgaagaagaatatgaattttgcctgcggatttgctaacactcgacaatcctaggaggtgagttccaacaaattggttcaaaaagaggggggataaacacgctggcccatgctgggcaagc

SEQ ID NO: 194 - DNA, 174 bp, Artificial Sequence
  Description of Artificial Sequence: Synthetic polynucleotide
ccatgggttccccttcagcctgtccatacagagtgtgcattccctggcaggggctcctgctcacagcctcgcttttaaccttctggaacctgccaaacagtgcccagaccaatattgatgtcgtgccgttcaatgtcgcagaagggaaggaggtccttctagtagtccataatg

SEQ ID NO: 195 - DNA, 174 bp, Artificial Sequence
  Description of Artificial Sequence: Synthetic polynucleotide
cccacatgcgctggatcagtccacggcttggggaaaggcatccagagaaggtgggagcggagagtttgaagtctttacaggcgggaagatggcggactggagctgaaagtgttgattgggaaacttgggtgattcttgtgtttatttacaatcctcttgacccaggcaggacac

SEQ ID NO: 196 - DNA, 174 bp, Artificial Sequence
  Description of Artificial Sequence: Synthetic polynucleotide
cccagccctcgtcgccgccgccattttagctgttggttccggccgcaccgtgtgggctgtagtagcgggaggggtgggggtcctccagagttaagtggctgtcctcgactgtgcccatacagcagccagctttcttccttaataactgcccgttcgaagagtgcgaggatgtcc

SEQ ID NO: 197 - DNA, 174 bp, Artificial Sequence
  Description of Artificial Sequence: Synthetic polynucleotide
cccccagccccctggtcccaccttgccttccgcccaccttcccacctgctgcagggagggccctcggctgagccttcagacacacttgcaccccatccgctcccctcctgaatttcttctgaccctcccttggcttcacagcacctgaaggccaggctgaggccccctgctctc

SEQ ID NO: 198 - DNA, 174 bp, Artificial Sequence
  Description of Artificial Sequence: Synthetic polynucleotide
ccccggagtgcagtcaagttgaccaagaagcgggcactgtccatctcacctctgtcggatgccagcctggacctgcagacggttatccgcacctcacccagctccctcgtagctttcatcaactcgcgatgcacatctccaggaggctcctacggtcatctctccattggcacc

SEQ ID NO: 199 - DNA, 174 bp, Artificial Sequence
  Description of Artificial Sequence: Synthetic polynucleotide
cccgccccaacccagcggttctgcgcatgcgcgggggccatattagcagcggttattcggtgagcggtggtggtttattcttccgtggagttaagggctccgtggacatctcaggtcttcagggtcttccatctggaactatataaagttcagaaaacatgtctcgaagatatg

SEQ ID NO: 200 - DNA, 174 bp, Artificial Sequence
  Description of Artificial Sequence: Synthetic polynucleotide
ccctaccctatgctaaggggactcgtctccacctcgtaaaggaaactccccaagggaatccctgtcccctattttcctatccttctacccttccaagacagtcctagcctatagaactcctacctcccatcccctgaggtggtccccattcctccctcccttcctccccccgcc

SEQ ID NO: 201 - DNA, 174 bp, Artificial Sequence
  Description of Artificial Sequence: Synthetic polynucleotide
ccctctttcagagtggtacatggaagacagcacaaagtggatccatactctgaaatgcagtaactctgatgcttgaatttgtctcccttcttgccagaaaggattctaataactcggtgtcaaagccaagacataaactcaaccccttctcttccaaaagcttcacgttacagc

SEQ ID NO: 202 - DNA, 174 bp, Artificial Sequence
  Description of Artificial Sequence: Synthetic polynucleotide
ccgaggccgcctggcccttgtttactaaccctccctcaaacgtttcctgggtggctccccagggacggcagggctgggggcttctctccagggagctgctgctgaggcctgtgtctcccgtggctcctctgacaggtcccgcctgactccgctctggaaagtccttttgaagaa

SEQ ID NO: 203 - DNA, 174 bp, Artificial Sequence
  Description of Artificial Sequence: Synthetic polynucleotide
ccgcctcctggcctcctggctgaggggaagctgagtgggccacggcccatgtgtcgcactcgcctcggctcccacacagccgcctctgctccagcaaggatgtggctcttccacactctgctctgcatagccagcctggccctgctggccgctttcaatgtggatgtggcccgg

SEQ ID NO: 204 - DNA, 174 bp, Artificial Sequence
  Description of Artificial Sequence: Synthetic polynucleotide
ccgctccctggcgtgactcggcactgagagtcccgggagaagactcggcggtcgccacctcttctgtccaggcctcggccttcctgagcatctctccttcctctcccagatcgtcttctccttcagtttcaaagccagtggcgtcgcggccaccctgccgggctctctgtgagg

SEQ ID NO: 205 - DNA, 174 bp, Artificial Sequence
  Description of Artificial Sequence: Synthetic polynucleotide
ccgctgctttggcggtgggcccagccgggagcagcctctttcgaaggccgccgtgacctcttcaagggcgtggagacgggaaggaaaaggccccggttggggttccagggcgccggtaacgttaaccggcgccttgcctgtcctctaaccgtcgctccctcctcccctagaaag

SEQ ID NO: 206 - DNA, 174 bp, Artificial Sequence
  Description of Artificial Sequence: Synthetic polynucleotide
ccgctggtcttttactgccatcaatacactgttcttggtgcaaatacttcagcctctttattcaaagtatgttttatgtttttgccaaatatgatctctaattgaaagtttatttttggttttggatgaatctgcggagcttaagttgtgagaagaaagggggaacaagacaca

SEQ ID NO: 207 - DNA, 174 bp, Artificial Sequence
  Description of Artificial Sequence: Synthetic polynucleotide
ccgggaacccctaccccatccccttattcagcacatgaaataaacaaggggcatccaaatcttgcggcaacgcccccgggacatgcatcgtcccctggactctctcaaaccccttatccctctggacagaatgcaggtccaaccacgctggtataccctcaaacccctcagaca

SEQ ID NO: 208 - DNA, 174 bp, Artificial Sequence
  Description of Artificial Sequence: Synthetic polynucleotide
ccgggaggctgagactgcattgttgggatttgatgcactaatctcctgtctccgccgcctttccctctgttcggtctcttgccctccctcccttcgtctgtccttcctccgtgtgtttgtctatcctcctctgtccctcctctttcctctccttgctttctttggttttctgca

SEQ ID NO: 209 - DNA, 174 bp, Artificial Sequence
  Description of Artificial Sequence: Synthetic polynucleotide
ccgtaaccgcctgttgccccctgtctcagagtccctcacgcgtcccctcccgtctttggctcgttggctgccgccgccggggcttcgccagccttcaagtcgagactactggccgaaggggcgtctgcggctctccgccgtccccagccctgcctctccctgggctctgcagcc

SEQ ID NO: 210 - DNA, 174 bp, Artificial Sequence
  Description of Artificial Sequence: Synthetic polynucleotide
ccgtcggatgtgattattgttgctattgttaccgctccgcctggactgggtgcccggtcggaaagtcccgctccccgctcctcctcccaggcgcggaagcttcgcgccgcccgcctcgggggacacctcccgcgccatctcgggggcactggagataaggcctccctccctgac

SEQ ID NO: 211 - DNA, 174 bp, Artificial Sequence
  Description of Artificial Sequence: Synthetic polynucleotide
ccgttcccctttcccctcccttccctatccccgacgaccggatcctgaggaggcagctgcggtggcagctgctgagttctcggtgaaggtatttcatttctcctgtcccctcccctccccaccccatctattaatattattcttttgaagattcttcgttgtcaagccgccaaa

SEQ ID NO: 212 - DNA, 174 bp, Artificial Sequence
  Description of Artificial Sequence: Synthetic polynucleotide
cctcattccccatgaatgctgtgggaagtcctgaggggcaggagctgcaaaagctggggagtggagcctgggacaaccccgcctacagtggtcccccttccccacacgggacgctgagagtctgcaccatctccagcacggggcctctccagccccaacccaagaagcctgaag

SEQ ID NO: 213 - DNA, 174 bp, Artificial Sequence
  Description of Artificial Sequence: Synthetic polynucleotide
cctcccccgccctcctggtccaatctccgatctgtttagtaagaaggcgcctgtgtctggcagagctggtgtgagacgagacaatcctgccccgccgccgggataatcaagagttttggccggacctttgagcatacaccgagagagtgaggagccagacgacaagcacacact

SEQ ID NO: 214 - DNA, 174 bp, Artificial Sequence
  Description of Artificial Sequence: Synthetic polynucleotide
cctctccccccgggctccgcccaccccacgccgggaacccacgcgggccactacaagcccgccctttcctacgtctggtccagtcggtcttcctccggcccgggccctggcccagctagccggccatggaaggtaatggccccgctgctgtccactaccagccggccagccccc

SEQ ID NO: 215 - DNA, 174 bp, Artificial Sequence
  Description of Artificial Sequence: Synthetic polynucleotide
cctctctccctcctccctcgctctctcccccttctctccccttcttcctcggtttcttccgtcctctctctccccctcctcctcccccgcctcctcctcctgcgctcccgccccctgccccctccccccgtgcctgcagacgcgcggatcgtccatgcgctcctcgcgggcaga

SEQ ID NO: 216 - DNA, 174 bp, Artificial Sequence
  Description of Artificial Sequence: Synthetic polynucleotide
cctctctgctgagtcagagctctgcatatattttaagaaaaggcattgaggaactcaatcaaaccagtattcttttcacacaggtttcatcagtttcacccttttctgtgtgcggctgattttagaaagattgcttccttgtatggtagcgataagtttgatttgccctatggg

SEQ ID NO: 217 - DNA, 174 bp, Artificial Sequence
  Description of Artificial Sequence: Synthetic polynucleotide
cctctcttccagggctgccgtccacactctcccggtcagagtcctgggaccacatggggacgctgccatggcttcttgccttcttcattctgggtctccaggcttgggatactcccaccatcgtctcccgcaaggagtggggggcaagaccgctcgcctgcagggccctgctga

SEQ ID NO: 218 - DNA, 174 bp, Artificial Sequence
  Description of Artificial Sequence: Synthetic polynucleotide
cctctggactttgaggaagaacccacagcaggaggaagtcagcagggagtggctgtgtgaaacctgggaccacttctgccttcctacgtggcagtggctcagagttatttgagtgctgtcaaactgagctgattgctgccctagtattagatcagtccatagaaagtgggagca

SEQ ID NO: 219 - DNA, 174 bp, Artificial Sequence
  Description of Artificial Sequence: Synthetic polynucleotide
cctgaagatgtagctcctactgttggattttcaaaaattaaccttagacaaggaaagtttgaagtcaccatctttgacttgggaggtggaataagaattcggggaatctggaagaattactatgctgaatcctatggggtaatatttgttgtggattccagtgatgaagagaga

SEQ ID NO: 220 - DNA, 174 bp, Artificial Sequence
  Description of Artificial Sequence: Synthetic polynucleotide
cctgcttttggttcttacagtagtcggcgtaggccttaggtgggttcgtgcgccttctacctcgctgtttcggttttcctggctcctcggcccttttctcccctgttgcagctgggagcggacgaagcgcgaagctgggattttttactgtctcctgaagaatttaacacaaac

SEQ ID NO: 221 - DNA, 174 bp, Artificial Sequence
  Description of Artificial Sequence: Synthetic polynucleotide
cctggatgtagctgagaggctgggagaagagacgaccgctggagaccgagcggcgtggggaagacctaggggggtgggtgggggaagcagacaggagaacactcgaaatcaagcgctttacagattattttattttgtatagagaacacgtagcgactccgaagatcagcccca

SEQ ID NO: 222 - DNA, 174 bp, Artificial Sequence
  Description of Artificial Sequence: Synthetic polynucleotide
cctgtcaaagccttcttaattatgtctgagaaaagtactaaaataggtgccattttaaattcccagacaaggaaaaaccaaggattagaaattaagtagcttgcccaaggccacacatcagatcctgattgagtcaatgctttgcattctcagtcctctgcataaagctgagag

SEQ ID NO: 223 - DNA, 174 bp, Artificial Sequence
  Description of Artificial Sequence: Synthetic polynucleotide
ccttcattccacagacacacacagcctctctgcccacctctgcttcctctaggaacacaggagttccagatcacatcgagttcaccatgaattcactcagtgaagccaacaccaagttcatgttcgatctgttccaacagttcagaaaatcaaaagagaacaacatcttctatt

SEQ ID NO: 224 - DNA, 174 bp, Artificial Sequence
  Description of Artificial Sequence: Synthetic polynucleotide
ccttcatttggggtttcggttcccccccttccccttccccggggtctgggggtgacattgcaccgcgcccctcgtggggtcgcgttgccaccccacgcggactccccagctcgcgcgcccctcccatttgcctgtcctggtcaggcccccaccccccttcccacctgaccagcc

SEQ ID NO: 225 - DNA, 174 bp, Artificial Sequence
  Description of Artificial Sequence: Synthetic polynucleotide
cgacttcggtctgcgccggaagtgcatgagctgccgatgtggtgcttagtgattgcggtttcggtcgctctcccgtgtttcccgggctgggtatttgcctcgcaccatggcgcccaagggcaaagtgggcacgagagggaagaagcagatatttgaagagaacagagagactct

SEQ ID NO: 226 - DNA, 174 bp, Artificial Sequence
  Description of Artificial Sequence: Synthetic polynucleotide
cgagggctcctgctggtactgtgttcgctgctgcacagcaaggccctgccacccaccttcaggccatgcagccatgttccgggagccctaattgcacagaagcccatggggagctccagactggcagccctgctcctgcctctcctcctcatagtcatcgacctctctgactct

SEQ ID NO: 227 - DNA, 174 bp, Artificial Sequence
  Description of Artificial Sequence: Synthetic polynucleotide
cgcaccgggtccgcggggaaccccctatctctaccttccccgacgcggctcccacaagacccccatctctgcgccgggcccctccacgtgcggggtctcaggtttgaggtggtcccctccaagtttaaagagaagctggacaaagcctccttcgctactccgtatgggtacgcc

SEQ ID NO: 228 - DNA, 174 bp, Artificial Sequence
  Description of Artificial Sequence: Synthetic polynucleotide
cgcactcccgttccagccaggctgagccttctgtcccctgcctctggggcctgggaaccccccttcttctttctcctgaatggcacccccgccctagaatccagacaccgagtttcccactgtggctggttcaagggtatgtgagagctccctggtgacagtctgtggctgagc

SEQ ID NO: 229 - DNA, 174 bp, Artificial Sequence
  Description of Artificial Sequence: Synthetic polynucleotide
cgccacgcactcctctttctgcctggccggccactcccgtctgctgtgacgcgcggacagagagctaccggtggacccacggtgcctccctccctgggatctacacagaccatggccttgccaacggctcgacccctgttggggtcctgtgggacccccgccctcggcagcctc

SEQ ID NO: 230 - DNA, 174 bp, Artificial Sequence
  Description of Artificial Sequence: Synthetic polynucleotide
cgcccgcccagccccgggggcagggagagcctagattacggaagtaccgcgagcaaggagcgcggaatcggggagcgtccggagctagctggatcctctaggcaggatggtgatgggaatctttgcaaattgtatcttctgtttgaaagtgaagtacttacctcagcagcagaa

SEQ ID NO: 231 - DNA, 174 bp, Artificial Sequence
  Description of Artificial Sequence: Synthetic polynucleotide
cgcccggcgagcccgcgaggtcactatcatatgacaaaggctttgccgcagttcatcttcctccctgtgtactttccatttgccttcctggaatcctgctgcatcacagaagctggaagttctgatgttccactgaaatcacaatggaaagtcttgacttgactggtcacagta

SEQ ID NO: 232 - DNA, 174 bp, Artificial Sequence
  Description of Artificial Sequence: Synthetic polynucleotide
cgcccgggccactgctctccaggaagataaggcttttaaagcagcctagcactagaaggctctgtgtgctccgggatggagcaggtgtgcagagggtgagaacccagctctgggaccaagtcacttgcttccttacttagcaagactatcgacttgagcaaacttggacctggg

SEQ ID NO: 233 - DNA, 174 bp, Artificial Sequence
  Description of Artificial Sequence: Synthetic polynucleotide
cgccggcctgcagtctagccgtagtgcgcctgcgcgcggctaggaggggccgtcaggcggggatacagcctggaaggtaatgcatgtccatggtacacaaattcacaagtttggagaccctgacacacccaccttctcacctgggctctgcgtatcccccagccttgagggaag

SEQ ID NO: 234 - DNA, 174 bp, Artificial Sequence
  Description of Artificial Sequence: Synthetic polynucleotide
cgcctcggcctttgagccccgcccccgccgtgcaaaaacaaccagaggctgctctgcttgagggtgaagccgcctcccagttttccctccccctctacccccacccccatagttctctccaccaggtccagtgacaattggatgatgcagccttgataatcatccgattccaga

SEQ ID NO: 235 - DNA, 174 bp, Artificial Sequence
  Description of Artificial Sequence: Synthetic polynucleotide
cgcgacttttgctttacccttctgctgtgctactgctgtcgcgagacttcctgctcatctgccgctccctttgccgccgccttagcccgggacccgaacccagcctctcccctacccgaacaccggccccggctccaccgaggcccgggtcccccagcccgtctcgccgccgcc

SEQ ID NO: 236 - DNA, 174 bp, Artificial Sequence
  Description of Artificial Sequence: Synthetic polynucleotide
cgcggccgccaaggcgtccttctcctcgaggctgggcagccttgtccgcggcatcacagccctcacctccaagcacgaagaagaaaaattaatccagcaggaactgagtagtctgaaagcgactgtttctgctcctactacaacactgctactggatattttgcttttcagaaa

SEQ ID NO: 237 - DNA, 174 bp, Artificial Sequence
  Description of Artificial Sequence: Synthetic polynucleotide
cgcgggggccgtaggaagccaaccttccctgcttctccggggccctcgccccctcctccccacaaaatcagggatggaggcgcctccccggcaccctcttagcagccctccccaggaaaagtgtcccccctgagctcctaacgctccccaacagctacccctgccccccacgcc

SEQ ID NO: 238 - DNA, 174 bp, Artificial Sequence
  Description of Artificial Sequence: Synthetic polynucleotide
cgcgtcgggctgcaggagaagatggcggtctccacaggagttaaagttcctcgtaattttcgcttgttggaagaacttgaagaaggacaaaaaggagtaggcgacggtacagttagctggggccttgaagatgatgaagatatgacacttacaaggtggacaggcatgattatt

SEQ ID NO: 239 - DNA, 174 bp, Artificial Sequence
  Description of Artificial Sequence: Synthetic polynucleotide
cgctctcctttcgttgcctgatcgccgccatcatgggtcgcatgcatgctcccgggaagggcctgtcccagtcggctttaccctatcgacgcagcgtccccacttggttgaagttgacatctgacgacgtgaaggagcagatttacaaactggccaagaagggccttactcctt

SEQ ID NO: 240 - DNA, 174 bp, Artificial Sequence
  Description of Artificial Sequence: Synthetic polynucleotide
cggaaacatggcggcgggaagagagtgagccgccccgcgcccccgccgcgccctcagatggagaaattagcatacaaagaaactgacttgtcagaagtcagagcaaggtattggtggatccagggataaatcccaaacttcttaacccctagaccggtttttagtccattgact

SEQ ID NO: 241 - DNA, 174 bp, Artificial Sequence
  Description of Artificial Sequence: Synthetic polynucleotide
cggaacttggatcacatcagatcctctcgagcccagggtgacaagattattgatggcgccccatgtgcaagaggctcccacccatggcaggtggccctgctcagtggcaatcagctccactgcggaggcgtcctggtcaatgagcgctgggtgctcactgccgcccactgcaag

SEQ ID NO: 242 - DNA, 174 bp, Artificial Sequence
  Description of Artificial Sequence: Synthetic polynucleotide
cggactgggaggcagggctctggctcacgcttgtaatcccaacattttgggaggacgaagccagcctcatcgcttaagcacaggagttcgaggactgggaggtggaggttgtggtgcctgtatcacctgcccttctgctgacactcctgcctgctgttcctgactacagccatc

SEQ ID NO: 243 - DNA, 174 bp, Artificial Sequence
  Description of Artificial Sequence: Synthetic polynucleotide
cggagggactttctgttagcagcatgagggcctgtggttagacctatagaggtatttcctttgatttaagccagaaagtcctgagagcggatcggggagcatttgcggatcggtcactttttcctcctttctgagtctcttatcccctaccacagggacggcccaggtggcagg

SEQ ID NO: 244 - DNA, 174 bp, Artificial Sequence
  Description of Artificial Sequence: Synthetic polynucleotide
cggcgccggaggaggaagtggtgaggttgttgctccttcagcgcctatcgctggctcttggggcgcagagaggggccgcagtctccgcggctgcgtcgagctcccttgcagtcccctccatgttccccggcgccactactccccttcctaaggccgccgcttaccccggggtct

SEQ ID NO: 245 - DNA, 174 bp, Artificial Sequence
  Description of Artificial Sequence: Synthetic polynucleotide
cggcgcctataaagtcgccctccgcccggacgtaaacaaacctcgcctggctcccagctggtgctgaagctcgtcagttcaccatccgccctcggcttccgcggggcgctgggccgccagcctcggcaccgtcctttcctttctccctcgcgttaggcaggtgacagcagggac

SEQ ID NO: 246 - DNA, 174 bp, Artificial Sequence
  Description of Artificial Sequence: Synthetic polynucleotide
cggcttctgctgctagcgccggagctgagttagttctgagaaggtttccctgggcgttccttgtccggcggcctctgctgccgcctccggagacgcttcccgatagatggctacaggccgcggaggaggaggaggtggagttgctgcccttccggagtccgccccgtgaggaga

SEQ ID NO: 247 - DNA, 174 bp, Artificial Sequence
  Description of Artificial Sequence: Synthetic polynucleotide
cgggcgcacaactgttgctctagaaacttctcctcctgctcccacgggggttacttgcactacccaggctcctcctgtggctcttcctaccccagcaacctggtctacagcactgacctctgctctcccagcacctgccagctgggttcctctctctataggggctgtcaggag

SEQ ID NO: 248 - DNA, 174 bp, Artificial Sequence
  Description of Artificial Sequence: Synthetic polynucleotide
cggggcgccgagacagggcgtgttcgctgttcagtgccggtgttgcagggagtgagggcagctggagtgcgttctgccgaagcttgtggttgcacgcccatcgtcttaggggctaccttccgtgttaccttatcccatatcacacaactggtcctcagccataacaagctaaca

SEQ ID NO: 249 - DNA, 174 bp, Artificial Sequence
  Description of Artificial Sequence: Synthetic polynucleotide
cggggcgccgctgagccaagtgggccacccgggcacggccacgctcccgggtcacgtgacacggagggggccgaattctgctggaggcagcgccatatcctggaggtgaaggtaccacctcatggagacccccgcggccgccgcccccgctgggagcttattcccctccttcct

SEQ ID NO: 250 - DNA, 174 bp, Artificial Sequence
  Description of Artificial Sequence: Synthetic polynucleotide
cggggtctccgggaagtcgcggcgccttcggatgtggcggatgcggccgtgagccggcgggggaggtgctgctgctgcctccactgtactcagacccaggtagcacaggattgtccatcctccagcagctcagtgcaacggtgtgaactcagcctgtttcagagcctccacacc

SEQ ID NO: 251 - DNA, 174 bp, Artificial Sequence
  Description of Artificial Sequence: Synthetic polynucleotide
cgtccctccctggaccccggcgacttcctctctcggtttgtctgggtcatcttgtctgcccgccgctggcctggccccgtctgtctctctcagcagctgtctttctcgcgcccactggccggtctctcctcttccccgcagttgcctccttctctgcctgcctgggtggccgcc

SEQ ID NO: 252 - DNA, 174 bp, Artificial Sequence
  Description of Artificial Sequence: Synthetic polynucleotide
cgtctaaattcgcgtcggttcttatttctctccctggcaaggtctgaagacggatggagtctagttctgtcgcccaggctggagcccagtggtgtgatctcagctcactgcaatctccacctcctggcttcaagcgattcttctgcttcagcctcccgactgtgtcagcgtgtt

SEQ ID NO: 253 - DNA, 174 bp, Artificial Sequence
  Description of Artificial Sequence: Synthetic polynucleotide
cgtctgggcagattattcctatgcatcctgccttcctcacccaggactggtctgagagggattcatgatggaagcatgttcattctgtgacctggttctcgcctaaatgtggtcaacagtgtcagcagttcagaggacatcaagcccttaccagggcttcccgggattggaaac

SEQ ID NO: 254 - DNA, 174 bp, Artificial Sequence
  Description of Artificial Sequence: Synthetic polynucleotide
cgttgcggccgctccctgccttagaggccagccttggacacttgctgcccctttccagcccggattctgggatccttccctctgagccaacatctgggtcctgccttcgacaccaccccaaggcttcctaccttgcgtgcctggagtctgccccaggggcccttgtcctgggcc

SEQ ID NO: 255 - DNA, 174 bp, Artificial Sequence
  Description of Artificial Sequence: Synthetic polynucleotide
ctaaactgagccttgaagaatggttaagagtttgctccaggaatatattgcaaaggcattcttggcggaaggacccgagacgtgaaaaaaacaggcgtattctggtaatttcgaggagaggtcgacagtgtggggagttggagtgacccggctggatgtgacccccaggacaga

SEQ ID NO: 256 - DNA, 174 bp, Artificial Sequence
  Description of Artificial Sequence: Synthetic polynucleotide
ctacacatctcattatagtttagggagtctcgctctatcccctaggctggagtgcattggcgccatctcggctcatttgcaacctctgtctcccgggttcaagcgattctcctgcctcagcttcccgaggagctgggattacaggtcctgagggagtctaacaagttagcagaa

SEQ ID NO: 257 - DNA, 174 bp, Artificial Sequence
  Description of Artificial Sequence: Synthetic polynucleotide
ctacctgaaaaccctggccgggtgctggggcttgaggagcagttcccacttcccagtctttttcacttttcacagctgcaaagttcagggagttgaactgcagtgctttcagttcactgctcactctgccacgatcaatctctgttgtaaattttcctcccagagcacgtgacg

SEQ ID NO: 258 - DNA, 174 bp, Artificial Sequence
  Description of Artificial Sequence: Synthetic polynucleotide
ctactgtgtacttacaaaccacactcatattcgtcacgtcatttcatcttcacccccacctccaaatgaggcttgaaatgagatgagatgttcctccctcccctttcaaccatggacctcacactgtggacttcctcttagagcctctgagttaggtacccaagccaaggcaca

SEQ ID NO: 259 - DNA, 174 bp, Artificial Sequence
  Description of Artificial Sequence: Synthetic polynucleotide
ctaggggtcgggctcggccgtcgtcgttgtttgtcgccgcatccccgcttccgggttaggccgttcctgcccgccccctcctctcctcccttcggacccatagatctcaggctcggctccccgcccgccgcagcccactgttgacccggcccgtactgcggccccgtggccacc

SEQ ID NO: 260 - DNA, 174 bp, Artificial Sequence
  Description of Artificial Sequence: Synthetic polynucleotide
ctatcaaggaagaaattgccaaaccatgtctttttttctgttttcagagtagttcacaacagatctgagtgttttaattaagcatggaatacagaaaacaacaaaaaacttaagctttaatttcatctggaattccacagaaccttcggctcgcgtgcttctgagctgctgtgg

SEQ ID NO: 261 - DNA, 174 bp, Artificial Sequence
  Description of Artificial Sequence: Synthetic polynucleotide
ctcactgcaagctctgcctcccggttgctgaacctgtttgcatgagttgctcctgacggccctttaggatacttccatgtctgtagggtctagagtgacatctcctcccctcccctgacgagatctgccctccttggcactgtgcttccccagaggggtggcctcgctgttccc

SEQ ID NO: 262 - DNA, 174 bp, Artificial Sequence
  Description of Artificial Sequence: Synthetic polynucleotide
ctcagcagtatttgcggaggttttcacaggaggccgttgcttcgtaaatattatacatgtattcttctttttggagcattttgattattactctcagacgtgcgtggcaacaagtgactgagacctagaaatccaagcgttggaggtcctgaggccagcctaagtcgcttcaaa

SEQ ID NO: 263 - DNA, 174 bp, Artificial Sequence
  Description of Artificial Sequence: Synthetic polynucleotide
ctcagttaatgcaattttgaagcatgccctgaatagattcagtcattatcaagtcaaactaaaaacggtgaaaggttgcgactattaccaaataggaaaaatctgaagacataagaactacacatgaggaatatgtcatttagcactttcactttttgatctccacagaagaca

SEQ ID NO: 264 - DNA, 174 bp, Artificial Sequence
  Description of Artificial Sequence: Synthetic polynucleotide
ctccccactctcaggctggtggggtggggaaagcagcccattcctgggctcagagactcccaccccagctcagagggagcaggggcccagccagggacggaccctcattcctcccagggaccccagacctctgtctctctcggcaggccttggctccttgaacttttggccgcc

SEQ ID NO: 265 - DNA, 174 bp, Artificial Sequence
  Description of Artificial Sequence: Synthetic polynucleotide
ctcccgcggtcctgctcggcggagtggggcattcttcgggggtgcatcagagggagggcagagcctgaggatctaagcgaaggcttccccgggtgtaatttcctgggctgtttgtgaggagagatcgaattcgcctcctgctctcaggcctctctgctcctgtcttttgtttgg

SEQ ID NO: 266 - DNA, 174 bp, Artificial Sequence
  Description of Artificial Sequence: Synthetic polynucleotide
ctccgctccaatcccggaagtgcgcgcggccccgcccccgccggttcgcgtctctctgctgcggcgcggggaccgctgtgctctcggaaacggggtctctgggggatccagtgacgtgcccaaccacagagaccagacccctcctcctgtagagagtggtgctgccctctcggg

SEQ ID NO: 267 - DNA, 174 bp, Artificial Sequence
  Description of Artificial Sequence: Synthetic polynucleotide
ctcctgggcccctcctcccttcaaggattgcgaagaactggtcgcaaatcctcctaagccaccagcatctcggtcttcagctcacaccagccttgagcccagcctgcggccaggggaccacgcacgtcccacccacccagcgactccccagccgctgcccactcttcctcactc

SEQ ID NO: 268 - DNA, 174 bp, Artificial Sequence
  Description of Artificial Sequence: Synthetic polynucleotide
ctcgaggtgggcggggagaagggggacgggcgcggacccgggtcccagggccaggcctcccttgtgagtagactatgcaaagaaaaagtgggccaccatatctggaaactacagtctatgctttgaagcgcaaaagggaataaacatttaaagactcccccggggacctggagg

SEQ ID NO: 269 - DNA, 174 bp, Artificial Sequence
  Description of Artificial Sequence: Synthetic polynucleotide
ctctgaaggcatggcgcgtacgaagcagactgctcgcaagtccaccggcggcaaggctccgcgcaagcagctggccaccaaggcggctcggaagagcgctccggccaccggcggtgtcaagaagccccatcgctatcggcctggtacagtggctctccgcgagattcgccgcta

SEQ ID NO: 270 - DNA, 174 bp, Artificial Sequence
  Description of Artificial Sequence: Synthetic polynucleotide
ctctgtggttcgggtccgctttcgtctccgtcctgctgccgttaccgccgctgctgccgccgcttgcgtcccccgctccggtctgtggtgcagccgggacccaggaccatgtctctgtctcgctcagaggagatgcaccggctcacggaaaatgtctataagaccatcatggag

SEQ ID NO: 271 - DNA, 174 bp, Artificial Sequence
  Description of Artificial Sequence: Synthetic polynucleotide
ctctttccgtctcaggtcgccgctgcgaagggagccgccgccatgtctgcgcatctgcaatggatggtcgtgcggaactgctccagtttcctgatcaagaggaataagcagacctacagcactgagcccaataacttgaaggcccgcaattccttccgctacaacggactgatt

SEQ ID NO: 272 - DNA, 174 bp, Artificial Sequence
  Description of Artificial Sequence: Synthetic polynucleotide
ctgaattctccattctgggctcttgcctgtgaaatctttctttgctttccccatcttttcctcgcattttttcaccatctttccctcaatctccaggagccaatgcgagactttggctccgattaagcgacggcccgagactcggggtgcgcgaggaggatcgacagagtggtg

SEQ ID NO: 273 - DNA, 174 bp, Artificial Sequence
  Description of Artificial Sequence: Synthetic polynucleotide
ctgatgtcttcatcattctcaaattcttaggacggtcgggccctggaaggaacgctctcggaattggccgcggaaaccgatctgcccgttgtgtttgtgaaacagagaaagataggcggccatggtccaaccttgaaggcttatcaggagggcagacttcaaaagctactaaaa

SEQ ID NO: 274 - DNA, 174 bp, Artificial Sequence
  Description of Artificial Sequence: Synthetic polynucleotide
ctgatgtgagctagtttgtctggttgagttggatgtttaaatagaaggcagaacaacaacaggtactccacatcagcattctcaagactggagaagttaggcctcagacatcccaagccttctcctttcattggaaacttgacatttttccgccagggtttttgggaaagccaa

SEQ ID NO: 275 - DNA, 174 bp, Artificial Sequence
  Description of Artificial Sequence: Synthetic polynucleotide
ctgcagacgaggcaggcggaagaggcgggacttcgcgggtgacgtcatcggggcgccggaggcccggggcgcctgggaatttgaagcaaacaggcagcgcgcgacaatggcggtcgctcgtgcagctttggggccattggtgacgggtctgtacgacgtgcaggctttcaagtt

SEQ ID NO: 276 - DNA, 174 bp, Artificial Sequence
  Description of Artificial Sequence: Synthetic polynucleotide
ctgcagaggagaccggagggcagaaggcagagtccaggcttagactgcagttcctcgcttacctgtgcagtctaattttgagctgcctctttgtagtcttaaaaggcaggagcttcgtgttgtgggtctgctaacccgtacgtttccgtgggcaagtcgtgtgtactcctcgcc

SEQ ID NO: 277 - DNA, 174 bp, Artificial Sequence
  Description of Artificial Sequence: Synthetic polynucleotide
ctgccctcctgcttccgttgctagggacgcttcggccgaggataccgcaatggatcaggaagaggggctgaaggccttggacaatattgtcactcaattcaacgcctatgaagatttcctggactcgcagatcactactgtggacttgtactacctggaggatgaaaccctggc

SEQ ID NO: 278 - DNA, 174 bp, Artificial Sequence
  Description of Artificial Sequence: Synthetic polynucleotide
ctgcgcggaagagtgctggccctggggaagccccttcctcacccaggcttcacacatttgaccctggctctctctcaggaggacccctcgctggaaaggcattttaagggccaccgagatgcagttacctgtgtggacttcagtatcaacacaaagcagctggccagtggctcc

SEQ ID NO: 279 - DNA, 174 bp, Artificial Sequence
  Description of Artificial Sequence: Synthetic polynucleotide
ctgctccaagtgtcctagatcaggaccctaggtaaagacttctgaaaaatacttgagtctagaaacagaaaagaaaaagggctagtgtgctctaggggtttgcactgttgtacccagtttgctttgctgtgtcctaggaaaggtcctttctggggatcaccccattggctgaag

SEQ ID NO: 280 - DNA, 174 bp, Artificial Sequence
  Description of Artificial Sequence: Synthetic polynucleotide
ctgctccttccgcgggtttccgactccctgccctagattttctgcttagcgacttggggtcccctctcgtttgcttctggtaggagtcgcaatcccagcagcaatagcccagaagaggacacggttcccgtaccgaagggttcagtaccagcagcccgaccatcacgcggcggg

SEQ ID NO: 281 - DNA, 174 bp, Artificial Sequence
  Description of Artificial Sequence: Synthetic polynucleotide
ctgctctgctctctattgattgtgtttctggagggcgtcctgttgaattcccacttcattgtgtacatccccttccgttccccccaaaaatctgtgccacagggttactttttgaaagcgggaggaatcgagaagcacgatcttttggaaaacttggtgaacgcctaaataatc

SEQ ID NO: 282 - DNA, 174 bp, Artificial Sequence
  Description of Artificial Sequence: Synthetic polynucleotide
ctgctctgtggtacttcctctctggctgatttagcaaacagcacctagacctggggccaggcctttggcagtgggacagatccagggataggctacaccaccctgccctgaccctgggattggcatcagcttccaaccagttcctgccaaagcttgtaagtcctcccgacggcc

SEQ ID NO: 283 - DNA, 174 bp, Artificial Sequence
  Description of Artificial Sequence: Synthetic polynucleotide
ctgctgacaccttgatcttggacttcccatcttccaggaaggcctgacctcagttgttccagggtaaagaatttgggcagtgcccacacccacgctgttggataacatttcttcaccataccagtgagggtgaatgtgtacacgcccagcttcctgcctgttactctccacagt

SEQ ID NO: 284 - DNA, 174 bp, Artificial Sequence
  Description of Artificial Sequence: Synthetic polynucleotide
ctgctgtgcagggcagggaagctccaggcaaacagcccagcaaacagcagcactcagctaaaaggaagactcacagaacacagttgaagaaggaaagtggcgatggacctcatcccaaatttggcggtggaaacctggcttctcctggctgtcagcctggtgctcctctatcta

SEQ ID NO: 285 - DNA, 174 bp, Artificial Sequence
  Description of Artificial Sequence: Synthetic polynucleotide
ctggaaggtgaattcatttttctgggtctctctgattctcagggactccagaccttcctatttatgttgttttttgtattctatggaggaatcgtgtttggaaaccttcttattgtcataacagtggtatctgactcccaccttcactctcccatgtacttcctgctagccaac

SEQ ID NO: 286 - DNA, 174 bp, Artificial Sequence
  Description of Artificial Sequence: Synthetic polynucleotide
ctggacgccttgctcctgcttctgctacgaccttctggggaaaacgaatttctcattttcttcttaaattgccattttcgctttaggagatgaatgttttcctttggctgttttggcaatgactctgaattaaagcgatgctaacgcctcttttccccctaattgttaaaagct

SEQ ID NO: 287 - DNA, 174 bp, Artificial Sequence
  Description of Artificial Sequence: Synthetic polynucleotide
ctggccacgccctctccgcgagtccagtcccacgcgggatgaagagggcaccctccgccaagaggctgctgcgggacccgggtttcccctttccggcgccttccagcctcccaatcctcgggtctcgcctccctccgtctcctccctttcccctgtctgtctttccattggtcc

SEQ ID NO: 288 - DNA, 174 bp, Artificial Sequence
  Description of Artificial Sequence: Synthetic polynucleotide
ctggggcccgctgtcggtctcccgtcctccgacatcttgtctggaacttccgcctggcagtctccagtaggagtggagctctgtgcggcgtagtttggtggaaaaacgggccttgcgtcggcctcacccccagtgtttgtgtttcagaatgaagactattctcagcaatcagac

SEQ ID NO: 289 - DNA, 174 bp, Artificial Sequence
  Description of Artificial Sequence: Synthetic polynucleotide
ctggttcctgagggagaatccacaagccccctcccctcttcagtggatactgaagactccctcgacgaaggacccggggccctggtattggagagtgatttgctactaggccaggatctggagtttgaggaggaagaggaagaggaggaaggcgacggcaacagtgaccagctc

SEQ ID NO: 290 - DNA, 174 bp, Artificial Sequence
  Description of Artificial Sequence: Synthetic polynucleotide
ctgtggcctcggggagtgggaagtggaggcaggagccttccttacacttcgccatgagtttcctcatcgactccagcatcatgattacctcccagcagataaccttgcctcgtacttactcaacaaaagtgaagccaaaagatactattttttggatttgggtggcttttcttc

SEQ ID NO: 291 - DNA, 174 bp, Artificial Sequence
  Description of Artificial Sequence: Synthetic polynucleotide
ctgtttgaacgggctctcccttgggtgcttagccccgcccccgtcccactctgccctgttgctgtcgcgccgctgctggttgctgtccctggtggggtggaagacaacccgtgagtattacaccttcatgtgggttactttgcccattgacctaaacaacaaatcagctaaaca

SEQ ID NO: 292 - DNA, 174 bp, Artificial Sequence
  Description of Artificial Sequence: Synthetic polynucleotide
cttcatctctccatctctgcgctgctgccggctgcgccatccagcacccagactccagcaccggccgaggacccccactccggctgcagggaccctgtcccagcgagaccgcaggcatgtcatccgaaaagtcaggactcccagactcagtccctcacacttctccgccgccct

SEQ ID NO: 293 - DNA, 174 bp, Artificial Sequence
  Description of Artificial Sequence: Synthetic polynucleotide
cttcgcagagcatggcggcgggcgagcttgagggtggcaaacccctgagcgggctgctgaatgcgctggcccaggacactttccacgggtaccccggcatcacagaggagctgctacggagccagctatatccagaggtgccacccgaggagttccgcccctttctggcaaaga

SEQ ID NO: 294 - DNA, 174 bp, Artificial Sequence
  Description of Artificial Sequence: Synthetic polynucleotide
cttgacaccagcagggtgacatccgctattgctacttctctgctcccccacagttcctctggacttctctggaccacagtcctctgccagacccctgccagaccccagtccaccatgatccatctgggtcacatcctcttcctgcttttgctcccagtggctgcagctcagacg

SEQ ID NO: 295 - DNA, 174 bp, Artificial Sequence
  Description of Artificial Sequence: Synthetic polynucleotide
cttgccgcgctgcactccaccacgcctcctccaagtcccagcgaacccgcgtgcaacctgtcccgactctagccgcctcttcagctcgccatggatcccaactgctcctgcgccgccggtgactcctgcacctgcgccggctcctgcaaatgcaaagagtgcaaatgcacctcc

SEQ ID NO: 296 - DNA, 174 bp, Artificial Sequence
  Description of Artificial Sequence: Synthetic polynucleotide
ctttatgttttgggattgtagttatgttagatattcctcagttggggtaattgtcttgcatcattatctcttatcataatctgtttttcttcacacagtgttatagttttgccgctggactcttccctcccttcccccaccccatcaggatgatatgagacttgaaagaagacg

SEQ ID NO: 297 - DNA, 174 bp, Artificial Sequence
  Description of Artificial Sequence: Synthetic polynucleotide
ctttgaccacctgatattgcttacatctggaacttcttggcttctcattccccagatgtgcgggtcagagaggagaagtttcaggagtctctaaagaagctgaagaacgaggagcaggaagctgagaagctaacagcttttatcagagagaagaaaacatcctggaagaatcag

SEQ ID NO: 298 - DNA, 174 bp, Artificial Sequence
  Description of Artificial Sequence: Synthetic polynucleotide
ctttgccaggaggctgcaccctgagatgccctctcaatttctccttcaggttcgcagagaacaggccagccaggaggtcaggaggccccagagaagcactgaagaagacctgcctgtgggtctcaattgcccagctccggcccacactctcctgctgccctgacctgagtcatc

SEQ ID NO: 299 - DNA, 174 bp, Artificial Sequence
  Description of Artificial Sequence: Synthetic polynucleotide
cttttaacgagggaccgagctacttccgggagagaatgggagggtggaaaattttgtgcgtttggcgggtttcgctctcttcataagtattgatcattccgcagccctggggaccggacacgtgaggaggtagtgacgccgacactgccagaacacactgctacaaggtcccag

SEQ ID NO: 300 - DNA, 174 bp, Artificial Sequence
  Description of Artificial Sequence: Synthetic polynucleotide
ctttttggagagtggtaatgtcttcctctttttgctttaggagaaagacagaataataagctgaatagaatctgaccattggctttcacctggccaggaccttctatgtagctctccttttgtggcccatgtgctgcatcctctgccctcagtgtgcaactggcccccaacgca

SEQ ID NO: 301 - DNA, 174 bp, Artificial Sequence
  Description of Artificial Sequence: Synthetic polynucleotide
gaaattaactgttagcagtagtgtttcttaatacataagctatatcatactcctcaagtagattctttgcttaaaactttcactgtaaataattttatagcaaccatgtgaataacttaagaataatagaatcagtctcatttgtaggcactgtagaccatctccattccctac

SEQ ID NO: 302 - DNA, 174 bp, Artificial Sequence
  Description of Artificial Sequence: Synthetic polynucleotide
gaacccgtttcttttccttccccagtgcgtctttcctgcgtcgttccggcgcggcgggagcagagatctgcggccgtttgcagcttgcggtagggaggcgtggtggtctgaagcctccgagcagccgcggccatggcggatgtaaccgcccgtagtctgcaatacgagtacaag

SEQ ID NO: 303 - DNA, 174 bp, Artificial Sequence
  Description of Artificial Sequence: Synthetic polynucleotide
gaactgttccccagagcattgttcctgagaaggaaaagagtccaaacacctacccacacctgctttgtgccaagaatccacagttggattgcaaggacagtgcgttcaagacccagctgttgagagtagaaaagcagaagaaaggacccgaggtcagcaagtgccctccccaca

SEQ ID NO: 304 - DNA, 174 bp, Artificial Sequence
  Description of Artificial Sequence: Synthetic polynucleotide
gaagaacctttgaattctaacggctgagctcttggaagacttgggtccttgggtcgcagggtctcactccattgcccaggccagagtgcggggatatttgataagaaacttcagtgaaggccgggcgcggtggctcatgcccgtaatcccagcattttcggaggccgaggcatc

SEQ ID NO: 305 - DNA, 174 bp, Artificial Sequence
  Description of Artificial Sequence: Synthetic polynucleotide
gaagactgagcggttgtggccgcgttgccgacctccagcagcagtcggcttctctacgcagaacccgggagtaggagactcagaatcgaatctcttctccctccccttcttgtgagatttttttgatcttcagctacattttcggctttgtgagaaaccttaccatcaaacacg

SEQ ID NO: 306 - DNA, 174 bp, Artificial Sequence
  Description of Artificial Sequence: Synthetic polynucleotide
gaagagtggaacccatacttgctggtctgatccatgcacaaggcggggctgctaggcctctgtgcccgggcttggaattcggtgcggatggccagctccgggatgacccgccgggacccgctcgcaaataaggtggccctggtaacggcctccaccgacgggatcggcttcgcc

SEQ ID NO: 307 - DNA, 174 bp, Artificial Sequence
  Description of Artificial Sequence: Synthetic polynucleotide
gaagagtttgttggactcaacgaggttcgagaggcccagggaaaggtgacagagctcacaccccagtgacctcttctgggaatgcctcgctgggaatgcagctgagcctgtgtgggtgtggagagaaggtgcagatggcctccggttttctctttgcaggctgagaaagtgttc

SEQ ID NO: 308 - DNA, 174 bp, Artificial Sequence
  Description of Artificial Sequence: Synthetic polynucleotide
gaaggatattgccgtaattctgaaagtttttttccttcctctcttcccttcgcagaggtgagtgccgggctcggcgctctgctcctggagctcccgcgggactgcctggggacagggactgctgtggcgctcggccctccactgcggacctctcctgagtgggtgcgccgagtc

SEQ ID NO: 309 - DNA, 174 bp, Artificial Sequence
  Description of Artificial Sequence: Synthetic polynucleotide
gaaggatccgttttggcgggcggttggcgttgcgcagaaggcggcggcggtggtggcttgtggtgcggcctcaccatacaggaacagggcagacgttagcgtgagtgatcactctcaatcccggggacctggtggccttagtctttcaggtggaacggtgtgcgacatgggaaa

SEQ ID NO: 310 - DNA, 174 bp, Artificial Sequence
  Description of Artificial Sequence: Synthetic polynucleotide
gaagtgtgtcagggccagcgtgccggccctacggaagccgagcctgaggcgagatctcgccttttgtattttcactgactcatatttcctttactcaggctcccacatcaggacgagaaggagccctcgagttaccgtgggagctgtgggagctgccctgtgactcttaggaag

SEQ ID NO: 311 - DNA, 174 bp, Artificial Sequence
  Description of Artificial Sequence: Synthetic polynucleotide
gacaccccctgggatcacactgagcttgccacatccccaaggcggccgaaccctccgcaaccaccagcccaggttaatccccagaggctccatggagttccctggcctggggtccctggggacctcagagcccctcccccagtttgtggatcctgctctggtgtcctccacacc

SEQ ID NO: 312 - DNA, 174 bp, Artificial Sequence
  Description of Artificial Sequence: Synthetic polynucleotide
gaccttctctttccctttccagcagccggagaagtgcgacaacaaccagtactttgatatctccgccctctcgtgtgttccttgtggagctaaccagaggcaagatgcccgaggtgttacagaagatggctggaactgcatttcttgccctagtgacttaactgccgaaggaaa

SEQ ID NO: 313 - DNA, 174 bp, Artificial Sequence
  Description of Artificial Sequence: Synthetic polynucleotide
gacgccgatgcggagctgagctggctttcctccagggctctggactccctgctgagcaagagagaaagaggcccgcccttccaccaggacgcctgaccctggggtccttcccaaacccgggtctcttccgactccgggcccaacagtttgtgcgattaaagtgaagaaacaatg

SEQ ID NO: 314 - DNA, 174 bp, Artificial Sequence
  Description of Artificial Sequence: Synthetic polynucleotide
gacgggcgctttggagccggccccaggcagcgtgtgtcggtcgcctagtctggagaactagtcctcgactcacgagatgaagttttaccatgttggccaggctggtctcgaattcctgacctcaagtgatctgcccaccttgacctcccaaagtgctgggattacagtgcaagg

SEQ ID NO: 315 - DNA, 174 bp, Artificial Sequence
  Description of Artificial Sequence: Synthetic polynucleotide
gactacaaggagacagaaggctgaggccggggtgctagagaaccttgccgtgctggaattcacgttgacgcccccacggagctctgctgcagagccctcgagtcccgcacttccggccgccaggtggcgctggttctgttgccaactcggagagactgagctgggccacgcaag

SEQ ID NO: 316 - DNA, 174 bp, Artificial Sequence
  Description of Artificial Sequence: Synthetic polynucleotide
gactgagcctcctgcttgaggtagttgtttttactcccagtccccaggctcacgagccccacgcgcgctcaatctgccctcccgcttctcctcgccactccgagttctgcgccctcgagatccagcgcatccgcggggtgggcgggtcctggcggctctttgccctcttccaac

SEQ ID NO: 317 - DNA, 174 bp, Artificial Sequence
  Description of Artificial Sequence: Synthetic polynucleotide
gactggcactttttcttttttctcagcaaactgtacaaaaccaaatctctttttgattttcaaggaaactaggttcctgccaaattttgaatctggacaataaacagacactttgtcctagcatctttctggaatcatttcgggatattttccacaagcaacacagaaacagga

SEQ ID NO: 318 - DNA, 174 bp, Artificial Sequence
  Description of Artificial Sequence: Synthetic polynucleotide
gacttctataaaaccctaagaggaggagctactgtgaaggtttctgcgtcttcaccctcactggctgtcgcttctcaatcagactccaagcagcgaagacttttggttgattttccaaaaggctcagtaagcaatgcgcagcagccagatctgtccaaagcagtttcactctca

SEQ ID NO: 319 - DNA, 174 bp, Artificial Sequence
  Description of Artificial Sequence: Synthetic polynucleotide
gacttgctctctaaagttgcaattgtaagaagaatgttgggtttccagattgctcttctgggcgtgggagaaggttctgtctatcagtgctgcgagaaaggaaagaaacaagtttgctctcagcggatctttaaatggatgagatggctaccactcagatttccaaagatgagc

SEQ ID NO: 320 - DNA, 174 bp, Artificial Sequence
  Description of Artificial Sequence: Synthetic polynucleotide
gagaaagaggacagagctgcccagtccttactcaacaagctgatcagaagcaaccttgttgataacacaaaccaagtggaagtcctgcagcgggatccaaactcccctctgtactcggtgaagtcttttgaagagcttcggctgaaaccacagcttctccaaggagtctatgcc

SEQ ID NO: 321 - DNA, 174 bp, Artificial Sequence
  Description of Artificial Sequence: Synthetic polynucleotide
gagaatagttagcaaacaagggaggttgtcatttcctcatcgtcaagctttgttcctcgtgggggctagaaatctctttccagttccagattgtgaagggttcctgagtaagcagcgtgtctccatccccctctctaggggctcttggatggaccttgcactctagaagggaca

SEQ ID NO: 322 - DNA, 174 bp, Artificial Sequence
  Description of Artificial Sequence: Synthetic polynucleotide
gagagaccttggagcgcgcgggaaagagaccaatataaactgtggcgggatagttttcgggtccttgtccagtgaaacaccctcggctgggaagtcagttcgttctctcctctcctctcttcttgtttgaacatggtgcggactaaagcagacagtgttccaggcacttacaga

SEQ ID NO: 323 - DNA, 174 bp, Artificial Sequence
  Description of Artificial Sequence: Synthetic polynucleotide
gagaggcgcatctgcgcaggcgcccggctcctaagtctacccaggaactgaccctgctctctcctttccctgttagacatgggcactccacagaaggatgttattatcaagtcagatgcaccggacactttgttattggagaaacatgcagattatatcgcatcctatggctca

SEQ ID NO: 324 - DNA, 174 bp, Artificial Sequence
  Description of Artificial Sequence: Synthetic polynucleotide
gagattttggactctgtcttcagctggacactccctccctgcaccatgtcttacagttgtggcctgcccagcctgagctgccgcaccagctgctcctcccggccctgtgtgccccccagctgccacggctgcaccctgcccggggcctgcaacatccccgccaatgtgagcaac

SEQ ID NO: 325 - DNA, 174 bp, Artificial Sequence
  Description of Artificial Sequence: Synthetic polynucleotide
gagcagagccctttcacacacctcaggaacacctttcggctgcccgctccccagacacacctgcagccctgcccagccggctttgctcacccactgcttgtaaatgccccagatatgagccagcccaggccccgctacgtggtagacagagccgcatactcccttaccctcttc

SEQ ID NO: 326 - DNA, 174 bp, Artificial Sequence
  Description of Artificial Sequence: Synthetic polynucleotide
gagcagggagtcagagacgccccgttccaggacccttgtcaccgggagacaggagcggggaggatctgtggggtcctgggttcagcactctgccctgctgccgctgaggagaggtcagccctgacaaaggtcagctagccccttgaggacatcagctttggcctcagggtccta

SEQ ID NO: 327 - DNA, 174 bp, Artificial Sequence
  Description of Artificial Sequence: Synthetic polynucleotide
gagccgtacgcctctgtaaacccaacttcctcacctttgaaacagctgcctggttcagcattaatgaagattagtcagtgacaggcctggtgtgctgagtccgcacatagaagaatcaaaaatgtccaaaatgtaactggagagaaagtgggcaacttttggagaacttctgca

SEQ ID NO: 328 - DNA, 174 bp, Artificial Sequence
  Description of Artificial Sequence: Synthetic polynucleotide
gaggaaggagagagtggaggaggagggctttgggttagggagagtgctttcgtttgttttaaatgggagaaactggagcatgttgccaagggcagagagccagcagagaggggtgaatggaagaaggagcgagaagggggttactgacgaagccttatcctggaggagagaagg

SEQ ID NO: 329 - DNA, 174 bp, Artificial Sequence
  Description of Artificial Sequence: Synthetic polynucleotide
gaggagcctgaggaagagggcggcgacggtggtggtgactgagcggagcccggtgacaggatggctgggcacagattggtgttggtattaggagatctgcacatcccacaccggtgcaacagtttgccagctaaattcaaaaaactcctggtgccaggaaaaattcagcacatt

SEQ ID NO: 330 - DNA, 174 bp, Artificial Sequence
  Description of Artificial Sequence: Synthetic polynucleotide
gaggcccagctgtaaattcctctctttgtactctttctctttatttctcagaccagccgacacttagggaaaatagaacctacgctgaaattttgggggcaggttctcttgctaggttttgaggttttgctgaagatattcctgaagaatcatcccaggtgccacactaaaaaa

SEQ ID NO: 331 - DNA, 174 bp, Artificial Sequence
  Description of Artificial Sequence: Synthetic polynucleotide
gagggacatcttttcaagtagaggctgtgttggggcatggtgagagagggtcttagcaggtaaccttcctttcctctccagactgaggaatcagagttctgattgtggagtgcctctctctaggacggggctgcagcataggagtctcagctgcttacatccaggtccaggatt

SEQ ID NO: 332 - DNA, 174 bp, Artificial Sequence
  Description of Artificial Sequence: Synthetic polynucleotide
gaggtcggagcggaaggacgtcgtggagattgcttgcgctggggtgccacacttaggctgagctgcaggttttcgcacagtcgcgagttaacctctgcttgctccagaggcctcgtcctaatccacctcggctgacggcgcgggatccctggctccgcgagcctcagcctcacc

SEQ ID NO: 333 - DNA, 174 bp, Artificial Sequence
  Description of Artificial Sequence: Synthetic polynucleotide
gagtcacgtgggtccccccggttccggcgcggttgaggccttcggtggtgaacgagtctccagcaccatgtctggtttgtctggcccaccagcccggcgcggcccttttccgttagcgttgctgcttttgttcctgctcggccccagattggtccttgccatctccttccatct

SEQ ID NO: 334 - DNA, 174 bp, Artificial Sequence
  Description of Artificial Sequence: Synthetic polynucleotide
gagtcctgctagatccccgcaagctaggccagctcctcccactgcctcccttcctctttctcctcctcttactcctttccagccagaccttggctgtctacaggatgggggacaccctgagccccggacatggcaaccacagagagagcagcccttttctttcccccttggagg

SEQ ID NO: 335 - DNA, 174 bp, Artificial Sequence
  Description of Artificial Sequence: Synthetic polynucleotide
gagtggcagttatatagaccggcggcggagcacgcgtgtgtgcggacgcagttgcgtgaggggtttgtactatcctcggtgctgtggtgcagagctagttcctctccagctcagccgcgtaggtttggacatatttgactcttttccccccaggttgaattgaccaaagcaatg

SEQ ID NO: 336 - DNA, 174 bp, Artificial Sequence
  Description of Artificial Sequence: Synthetic polynucleotide
gagttgcagtttgagagcagttccgggcagggaggcgcctttgctgccctcacagacttggcccctagcagtgcagaactacaagtcccagggatcctagcgaccgtccgtccgtagtcaagttgccggtggaattggcccaggatgacagctggagaatggagtcagttttat

SEQ ID NO: 337 - DNA, 174 bp, Artificial Sequence
  Description of Artificial Sequence: Synthetic polynucleotide
gatctacaggagggcggctgtactgtgcttcgccttatatagggcgacttggggcacgcagtagctctctcgagtcactccggcgcagtgttgggactgtctgggtatcggaaagcaagcctacgttgctcactattacgtataatccttttcttttcaagatttttattttag

SEQ ID NO: 338 - DNA, 174 bp, Artificial Sequence
  Description of Artificial Sequence: Synthetic polynucleotide
gatctactaagcatcatttttgcatgactactgcaaaaggattactttacagataccagttcctttgtcaagagcatactttggaccctgttttcagaaagcagggcactctttaatgaagaaacaccagagctgttaaacacattgagacacagaagattctagtgactgagg

SEQ ID NO: 339 - DNA, 174 bp, Artificial Sequence
  Description of Artificial Sequence: Synthetic polynucleotide
gatgatgtcagcactgcttccggtcggtggcgcttctctctggcccgagccagcatgatccgctgggcccccagcgcatctcctggaagagcccactcaccctggacgagctcttcggtagcctcagaccgtccttgaagaggatgactgagacattatgggccacgcgctgtg

SEQ ID NO: 340 - DNA, 174 bp, Artificial Sequence
  Description of Artificial Sequence: Synthetic polynucleotide
gatggcggcagcgatgcctgcccggctgttggggtggcggtgacgacaggcagcaaaagaccagataatgcctcacatctctgtccccccgggaccccctggagcccccatgatccctaagaagacagcttgaacctagaattcccctctccctccctagatctcacccccagg

SEQ ID NO: 341 - DNA, 174 bp, Artificial Sequence
  Description of Artificial Sequence: Synthetic polynucleotide
gattacagtgccaaccttactcccaaagtttgccacgaaatatctcgcttctgttattttcgcatggttctggtatattgacttttgaaacaaaagacatcattctgtttatagcattctgtttttagtagtgggatttccatctacaaaatatagtaattctcgatcgctgaa

SEQ ID NO: 342 - DNA, 174 bp, Artificial Sequence
  Description of Artificial Sequence: Synthetic polynucleotide
gattccgtagagacactcctccgctgcctgagtcctcggcgaacatggcggcccccgagtcagggccggctttgagtccaggcactgcagagggtgaggaggagacgattctctatgacttgttggtcaacaccgagtggccaccggagactgaagtacagcctagaggcaacc

SEQ ID NO: 343 - DNA, 174 bp, Artificial Sequence
  Description of Artificial Sequence: Synthetic polynucleotide
gattggctgggacggctgtgggtggggagaagccgggaggactgggtgcgcctgcagggatcggaagccggttggggtgtgagaggttttctcgctctagggagattcttcaagcaatcactatgtcaacagacacaggtgtttcccttccttcatatgaggaagatcagggat

SEQ ID NO: 344 - DNA, 174 bp, Artificial Sequence
  Description of Artificial Sequence: Synthetic polynucleotide
gcaaacaccgagctcctccagagccgcccgggagcagggagggctccgctagcccggggggccctccccgcggggcagatgagttccatatccagactctcaaaccatgttttgggatcatccaaacattccatcctcctgactccataaactattggattcataacctgctcc

SEQ ID NO: 345 - DNA, 174 bp, Artificial Sequence
  Description of Artificial Sequence: Synthetic polynucleotide
gcaacacaaggattcccctccagctctgtgatgtggggagcagagggccactgagtcctgccatgggcatggtctagtggcccagtcaggacgcggaaacactccctggaggttctgacccactccctctcagcctccgcctggtctctggtgtagtcgccgccgccagccgcc

SEQ ID NO: 346 - DNA, 174 bp, Artificial Sequence
  Description of Artificial Sequence: Synthetic polynucleotide
gcaagaaactgagagtgagaaagaagggactggccagagttactcagctagacagtgacagacaacagtggaacttctgattggcaaacgcactgcctacttacagcatagagacccccagtggagagctagactgtttgaattccagaaggaccaacaccagataaattatga

SEQ ID NO: 347 - DNA, 174 bp, Artificial Sequence
  Description of Artificial Sequence: Synthetic polynucleotide
gcacacacgggcgcgcacacacacgcgcgtacacactgggtctccaggcagcggccgtcgccgcatccccggcagcagctccaggcaaagtgacagaggacagtgctgctgtgagtttgacgaagtggacatcacctgcagtcagtccagagctgcccagtcttgaatataatc

SEQ ID NO: 348 - DNA, 174 bp, Artificial Sequence
  Description of Artificial Sequence: Synthetic polynucleotide
gcagaaagaatgtggattttagagttctagataggggttttcatttaggccttgcgacatggctgttacatgaccttggttggtctgtttccctaacctctttgtgcctcatttgtcttacctactaaataggctaatagtactacctcgcagcatgaagatgattttaataag

SEQ ID NO: 349 - DNA, 174 bp, Artificial Sequence
  Description of Artificial Sequence: Synthetic polynucleotide
gcagattctgtggttatactcactcctcatcccaaagaatgaaatttaccactctcctcttcttggcagctgtagcaggggccctggtctatgctgaagatgcctcctctgactcgacgggtgctgatcctgcccaggaagctgggacctctaagcctaatgaagagatctcag

SEQ ID NO: 350 - DNA, 174 bp, Artificial Sequence
  Description of Artificial Sequence: Synthetic polynucleotide
gcagccattttaattcatatttgagtgggcggtggcgattggtgttggcggtctggctcagctgggcagggggtaactttactgatttgggggtggtttttagtttaatttttcttttctagcttcccatcgacggtcagtgcgcacgttgtaatcagctgaggccatgtcagg

SEQ ID NO: 351 - DNA, 174 bp, Artificial Sequence
  Description of Artificial Sequence: Synthetic polynucleotide
gcagcgcacacggccagctccgcgcaggcagactgcacagcccgccccaagggtcacgcccaccctgctaaggtgctaactttggacatctacttgagtaagactgagggggcacaagtggacgagccggtcgtgattactcccagagcggaagattgcggtgactgggacgac

SEQ ID NO: 352 - DNA, 174 bp, Artificial Sequence
  Description of Artificial Sequence: Synthetic polynucleotide
gcataagttgtcagtccccagcagtgtttgggagccttaacaggcttgctaagtgcctgagattaaaggcgaagaggaagaagagcaagaagggcaacccggtgtttaacacacggctttcaggcgctctcaggtttcattttcctttggaatttctgctttacagacagaaca

SEQ ID NO: 353 - DNA, 174 bp, Artificial Sequence
  Description of Artificial Sequence: Synthetic polynucleotide
gcatcctttcaatgacctgttttcttctgtaaccacaggttcggtggtgagaggaagcctcgcagaatccagcagaatcctcacagaatccagcagcagctctgctggggacatggtccatggtgcaacccacagcaaagccctgacctgacctcctgatgctcaggagaagcc

SEQ ID NO: 354 - DNA, 174 bp, Artificial Sequence
  Description of Artificial Sequence: Synthetic polynucleotide
gcatgcgcactgggcgtccccacgccaccgcccatcagctgagaattgcagctgagggctccggggtaggtgggtgacggcggtcggaggtgtaggagggagccgtggaggtccaggtgactgcttagaaaactgcacagcatctgatgaaattagcgaataagaacatcaacc

SEQ ID NO: 355 - DNA, 174 bp, Artificial Sequence
  Description of Artificial Sequence: Synthetic polynucleotide
gcatttgcaacactgagaagttatcttaagggaggctgggccccattctactcatctggcccagaaagtgaacaccttgggggccactaaggcagccctgctaggggagacgctccaacctgtcttctctctgtctcctggcagctctcttggcctcctagtttctacctaatc

SEQ ID NO: 356 - DNA, 174 bp, Artificial Sequence
  Description of Artificial Sequence: Synthetic polynucleotide
gccaaacatctattaggcaaaattggcctcttgcccatgatttgactttccagcacagccagttctttttctcctctgcagctgattggctctggagtgtggccagaagcctctctcctgcaattaaaggagtcgggtctctaactgttgatctgtttttttcccttctgagca

SEQ ID NO: 357 - DNA, 174 bp, Artificial Sequence
  Description of Artificial Sequence: Synthetic polynucleotide
gcccactttactgttttggctccagactgtcgttaagaatgtacagcctaattctggtgtgtttcgggatattcttctgtccagtattctggaagggcggggaggcatggcagcgttttacttgacgttgatggtgctgtgaagtccattctttcctctgcaagactactgact

SEQ ID NO: 358 - DNA, 174 bp, Artificial Sequence
  Description of Artificial Sequence: Synthetic polynucleotide
gcccatggctgagacctctctcccagagctggggggagaggacaaagccacgccttgccccagcatcctggagctggaggagctcctgcgggcagggaagtcttcttgcagccgtgtggacgaagtttggcccaaccttttcataggagatgcagctggtccttactccctgcc

SEQ ID NO: 359 - DNA, 174 bp, Artificial Sequence
  Description of Artificial Sequence: Synthetic polynucleotide
gcccccgccccctactcccttccctcaggccccaggaagttgcaagagtaccatttgtcgcacactcggggaccgcgggtggccggaggagatgaaaccgtcttggctgcagtgtcgtaaagtcaccagcgccggggggctcggagggcccttgcctgggtcctctccggcccg

SEQ ID NO: 360 - DNA, 174 bp, Artificial Sequence
  Description of Artificial Sequence: Synthetic polynucleotide
gcccgcggtgcggtgcggagactccatgaggccctggacatgaacaagctgagtggaggcggcgggcgcaggactcgggtggaagggggccagcttgggggcgaggagtggacccgccacgggagctttgtcaataagcccacgcggggctggctgcatcccaacgacaaagtc

SEQ ID NO: 361 - DNA, 174 bp, Artificial Sequence
  Description of Artificial Sequence: Synthetic polynucleotide
gcccgcggtgggccgacttcccctcctcttccctctctccttcctttagcccgctggcgccggacacgctgcgcctcatctcttggggcgttcttccccgttggccaaccgtcgcatcccgtgcaactttggggtagtggccgtttagtgttgaatgttccccaccgagagcgc

SEQ ID NO: 362 - DNA, 174 bp, Artificial Sequence
  Description of Artificial Sequence: Synthetic polynucleotide
gcccggccacgcgcaagccgcagggcaccctcatactactacttctgccttattacccttaaaactggagtctcagttatttgtatcccactattggtttttttttaaatcttttttcgtgggtttgcccccttttcctcagctgcgtttctgtcttcagtcctgtagggcaca

SEQ ID NO: 363 - DNA, 174 bp, Artificial Sequence
  Description of Artificial Sequence: Synthetic polynucleotide
gccctgggggatttttttcttctatgcctctctggtggaatgacatttgctgtgtaggcatctttcctctgactgtatttcttggccttgaagagtactgagtttaaaaagacagtatgtgacagtccatggaaattgcctcttctgtgaaatctcgccacctgctccgaagac

SEQ ID NO: 364 - DNA, 174 bp, Artificial Sequence
  Description of Artificial Sequence: Synthetic polynucleotide
gccgaagcggcgggatgagcggagccggcgtgggcggggcgtccgaggagagccaggccatgcaggcccacgtgtctattatcctcccagtccacaacgctgaaccgtggctggacgaatgtttgaggtctgttttgcaacaggactttgaaggtaccatggagctgtctgttt

SEQ ID NO: 365 - DNA, 174 bp, Artificial Sequence
  Description of Artificial Sequence: Synthetic polynucleotide
gccgacttggaaatgtgaacgcaagaagcaggcttgatttttttttctccccccttctctctctctctctctctctctcttcctctctccctctttctcctctctcacccacactcacgcacacctccaaaccgcacacccagacgcacacgcataccccagcgcccggcagtt

SEQ ID NO: 366 - DNA, 174 bp, Artificial Sequence
  Description of Artificial Sequence: Synthetic polynucleotide
gccgcaggcgcgctaggagaactatgccatttttgggtcaggactggagatctcctggatggagttggattaagacagaagatggctggaagagatgtgaatcttgtagtcagaaacttgaaagagagaataaccgttgtaacatcagtcacagcattatcttaaatagtgaag

SEQ ID NO: 367 - DNA, 174 bp, Artificial Sequence
  Description of Artificial Sequence: Synthetic polynucleotide
gccgccatattgaataagcgacccggcctcctagggggtcgtcgtggtccagacagtttagcagaacagcctccgcggctccggggagaagcaatatgttaaggatacctgtaagaaaggccttagtaggcctttctaagtctcctaaaggatgtggcttgtgagaaggttggc

SEQ ID NO: 368 - DNA, 174 bp, Artificial Sequence
  Description of Artificial Sequence: Synthetic polynucleotide
gcctctggggttttatattgctctggtattcatgccaaagacacaccagccctcagtcactgggagaagaacctctcataccctcggtgctccagtccccagctcactcagccacacacaccatgtgtgaagaggagaccaccgcgctcgtgtgtgacaatggctctggcctgt

SEQ ID NO: 369 - DNA, 174 bp, Artificial Sequence
  Description of Artificial Sequence: Synthetic polynucleotide
gcctgtgctgtgcctgcctcctagagctcattccctacgccccgactctgtcctggacagcgtgcccaccagccatggcggggccccggggcctcctcccactctgcctcctggccttctgcctggcaggcttcagcttcgtcagggggcaggtgctgttcaaaggctgtgatg

SEQ ID NO: 370 - DNA, 174 bp, Artificial Sequence
  Description of Artificial Sequence: Synthetic polynucleotide
gccttccatccctgctcctgcaccggtctgcatctcccagcagaaggcgcagccatgaatccgttattcggccccaacctcttcctcctgcagcaggagcagcagggcctggccgggccactgggggactcactgggaggcgaccacttcgccgggggaggagacttgcccccg

SEQ ID NO: 371 - DNA, 174 bp, Artificial Sequence
  Description of Artificial Sequence: Synthetic polynucleotide
gcgaaaggggagctgttggaattcaaatagactttctggttcccagcagtcggcagtaatagaatgctttcaggaagatgacagaatcaggagaaagatgctgttttgcactatcttgatttgttacagcagccaacttattggcatgatggagtgacaggaaaaacagctggc

SEQ ID NO: 372 - DNA, 174 bp, Artificial Sequence
  Description of Artificial Sequence: Synthetic polynucleotide
gcgaggggaccctgtggggcttgggacgagagacgggggtctttccgtgggaaccgagctaggtgccgggcaagagacgcgcggctggcccacctggatcctggccaactcgggattgagttcgttcctggtctcagaaggcccgttttgctttcagggaggagcttgtgaaaa

SEQ ID NO: 373 - DNA, 174 bp, Artificial Sequence
  Description of Artificial Sequence: Synthetic polynucleotide
gcgcactcagggtctgaggcagctagtagccggagggtcaccatgaagttcaatcccttcgttacctgggaccgcagtaaaaaccgcaaacgtcacttcaatgccccctcacacgtgcgcaggaagatcatgtcatccccgctctccaaggagctgcggcagaagtacaatgtc

SEQ ID NO: 374 - DNA, 174 bp, Artificial Sequence
  Description of Artificial Sequence: Synthetic polynucleotide
gcgccagcttggagagccagccccatcggggttccccgccgccggaagcggaaatagcaccgggcgccgccacagtagctgtaactgccaccgcgatgccgaaggcgcccaagcagcagccgccggagcccgagtggatcggggacggagagagcacgagcccatcagacaaag

SEQ ID NO: 375 - DNA, 174 bp, Artificial Sequence
  Description of Artificial Sequence: Synthetic polynucleotide
gcgccctgcagataagagccccaggccctgcagtcaactctgggaggccgtgggctggactttcaggctgaacccaccccacatttctccctcgggaatctgattaaggcagtgattcttcattgcctgccctcctgtccacactcctgcctactgccacccacaagggtcatc

SEQ ID NO: 376 - DNA, 174 bp, Artificial Sequence
  Description of Artificial Sequence: Synthetic polynucleotide
gcgggggcggggcacctctgtgcagggttcccagtcaccgcgacgctcctcgggaagccatagggcgcctcccagcccgtctccccgctccagtttagaacctaattcccaattccgggaccgggcccagccctgggctcttactgtccgcttttgctgggacctgttccacaa

SEQ ID NO: 377 - DNA, 174 bp, Artificial Sequence
  Description of Artificial Sequence: Synthetic polynucleotide
gcggtcttttcctcccactcttggctggttggaccccgctatggaaaagttggcccctgagccagagctccagcagccttgttagggcgtggcctgaggcttggataagtgggatgtaaaacgaagatcaggagcagatttgaagaattacaaagtgaattggtgccagtcagc

SEQ ID NO: 378 - DNA, 174 bp, Artificial Sequence
  Description of Artificial Sequence: Synthetic polynucleotide
gctcctgcgcgctgaggctccggcggacctctggtggacatggctgcttcccgcttacccccagcgacgctaacgttaaagcagttcgtaagaaggcaacaagttcttctcctctacagaaggattttgcaaacaattcggcaagttccaaatgattctgatcgcaaatacctg

SEQ ID NO: 379 - DNA, 174 bp, Artificial Sequence
  Description of Artificial Sequence: Synthetic polynucleotide
gctctgaaagtgttccagctgaaatttcagatcggacagactcgctgcggctccggaggcagtgattccaagctgctcgcgcacgctgctgccaagctgcaggatggtgcacgtagccaggctgctgctgctgctcctcactttcttcctccgcacggatgctgagacacctcc

SEQ ID NO: 380 - DNA, 174 bp, Artificial Sequence
  Description of Artificial Sequence: Synthetic polynucleotide
gctcttagtcgcgggccgactggtgtttatccgtcactcgccgaggttccttgggtcatggtgccagcctgactgagaagaggacgctcccgggagacgaatgaggaaccacctcctcctactgttcaagtacaggggcctggtccgcaaagggaagaaaagcaaaagacgaaa

SEQ ID NO: 381 - DNA, 174 bp, Artificial Sequence
  Description of Artificial Sequence: Synthetic polynucleotide
gctgaccacaggagccggtgctggggactgagggaaacttagagttcagagagggggtgtgatttgcctgaggtcacacagcaagttagagacccagctccacgactcattgtcttggctttggccctcgtcatcctgcccacccagcggggcttcccaacccaccacacagcc

SEQ ID NO: 382 - DNA, 174 bp, Artificial Sequence
  Description of Artificial Sequence: Synthetic polynucleotide
gctgactgccactaccagccggagccagggcctggtcgagacaactatttttgaggtatctgaggctaccccacagcactctctggcattggcaagactcgtggctgtgacccatgggcctctgaggaggcgttgtaagtccgcccagctccccacttgctgtgctctcactca

SEQ ID NO: 383 - DNA, 174 bp, Artificial Sequence
  Description of Artificial Sequence: Synthetic polynucleotide
gctgagccatgacccatgaaccatggaagcttgactctagattgaccatcttgagatgccaaagatgtccacgtcctaatcccatgtgggagacagaataatggccctgcagaccttcccagctggccatgacccctcatttgaccagctcttcccttctctctgaccagcacc

SEQ ID NO: 384 - DNA, 174 bp, Artificial Sequence
  Description of Artificial Sequence: Synthetic polynucleotide
gctgtgagggttactatgctccctctttgccgccgtctcctcctcttgcccgcgcaggcacccctctggctgctcagtcctgcctcagtgtcaaaccagaagagaagtaaaattcaacaaaaatttatgtgtggagttccttcttaaaagaagaaaaaagtgattatttagact

SEQ ID NO: 385 - DNA, 174 bp, Artificial Sequence
  Description of Artificial Sequence: Synthetic polynucleotide
gcttaggagcacccaccaagctctggcagggtctccagcacccatctcgggcagaggctgggggagtgactgctggtgcaagccccaaagtgcatgcggcaaaaacatggatgcagagctggtggcaagaagaggggctaagttatagagtcaacgtggaggtaccaggccacc

SEQ ID NO: 386 - DNA, 174 bp, Artificial Sequence
  Description of Artificial Sequence: Synthetic polynucleotide
gcttccgtagaggccagctggttgctacgcagcaacaggaaacattccgcgctaccgagtactttctactcccgaccaggcattgctctctctggagaccctcggcggtggttgctgtattttgacttggagtaaggatgacttttcgggccacagatagtgaatttgacctga

SEQ ID NO: 387 - DNA, 174 bp, Artificial Sequence
  Description of Artificial Sequence: Synthetic polynucleotide
gcttgggtaggggccaggctagcctgagtgcacccagatgcgcttctgtcagctctccctagtgcttcaaccactgctctccctgctctactttttttgctccagctcagggatgggggtgggcagggaaatcctgccaccctcacttctccccttcccatctccaggggggcc

SEQ ID NO: 388 - DNA, 174 bp, Artificial Sequence
  Description of Artificial Sequence: Synthetic polynucleotide
gctttccttttagcttttgtaagttacacgtcaaaatggccgatctgacatcggtgctcacttctgttatgttttctccctctagtaaaatgtttatcggtggactgagctggcagacctcaccagatagccttagagactattttagcaaatttggagaaattagagaatgta

SEQ ID NO: 389 - DNA, 174 bp, Artificial Sequence
  Description of Artificial Sequence: Synthetic polynucleotide
ggaaccgccctgctgccgccgcctgcttcctctgctcgcggttagcccgtcagtccctgctctgtgcgcgcctccatctgggccatggatggcggggatctgatgagcttctttcttctggcatcattaacggaccttttaccatgaatagttctactccttctacaggtgtgt

SEQ ID NO: 390 - DNA, 174 bp, Artificial Sequence
  Description of Artificial Sequence: Synthetic polynucleotide
ggaaggaggctgagtgactactggactggatattgactctaactcttgtttccaagcttatatcctcaatcacctaaagatcagagtgtgaagaaacaaacctgtgacagatctgtggttgaggtttagactgggggaggagtatagtactggactttctttgtaacttgtacc

SEQ ID NO: 391 - DNA, 174 bp, Artificial Sequence
  Description of Artificial Sequence: Synthetic polynucleotide
ggaaggcagagctgcaatctagttaactacctcctttcccctagatttcctttcattctgctcaagtcttcgcctgtgtccgatccctatctactttctctcctcttgtaggcaagcctcagactccaggcttgagctaggttttgtttttctcctggtgagaattcgaagacc

SEQ ID NO: 392 - DNA, 174 bp, Artificial Sequence
  Description of Artificial Sequence: Synthetic polynucleotide
ggaagtagggcctgatgtaaacacccgagccgggctccaaggcccgggaggtcagaaaaccgggccgcgggcggcaccgacagctggggcccgggtcagggacacgcggaggtcaggccggtgaaggcggcaggaagctggagcacgatcccaggaggaacaatcctgcaccat

SEQ ID NO: 393 - DNA, 174 bp, Artificial Sequence
  Description of Artificial Sequence: Synthetic polynucleotide
ggaagtgccgaatggggaccaagatggcggaccttgattcgcctccgaagctgtcaggggtgcagcagccgtctgagggggtgggaggtggccgctgctccgaaatctccgctgagctcattcgctccctgacagagctgcaggagctggaggctgtatacgaacggctctgcg

SEQ ID NO: 394 - DNA, 174 bp, Artificial Sequence
  Description of Artificial Sequence: Synthetic polynucleotide
ggaagtggctctcagggcgcttccggggaccaggcccgcttttggctgcatcagccggggattgccggcgccaggcatctgcatctgggaccgacctcctgggctggctgatcaaagaggaagcagcagcaatgtctgctgtgggggctgcaactccatacctgcatcatcctg

SEQ ID NO: 395 - DNA, 174 bp, Artificial Sequence
  Description of Artificial Sequence: Synthetic polynucleotide
ggaatacctaggcctccagactactccccctaactcatatttagattcctgaagcttctgcacatgtagttcctagagctgctgcttattaaaatgtcaacatcttcatcttctagctgggacaacctcttagagtctctctctctcagcacagtatggaattggatacaagca

SEQ ID NO: 396 - DNA, 174 bp, Artificial Sequence
  Description of Artificial Sequence: Synthetic polynucleotide
ggaccggtgtgctaggagatgatcggggaaagcatagtcccctgtctgtggcaccagacactcccgactgtgcgctgactctccccgcccagccagcagccttttccagagaggctgtggtccatagcctctgttcgttttcactgcaggaccaggcacgaaagttaaaacaaa

SEQ ID NO: 397 - DNA, 174 bp, Artificial Sequence
  Description of Artificial Sequence: Synthetic polynucleotide
ggagcccggttaggaagaatggagttggcgactcgctaccagagcacttcgcaggcatagtttggaagtcatcagggctggttcttttccttccagatccctaaagaagtggctgacatctttaacgcccccagtgatgatgaagagtttgttggcttccgagatgatgttccc

SEQ ID NO: 398 - DNA, 174 bp, Artificial Sequence
  Description of Artificial Sequence: Synthetic polynucleotide
ggagccgtccgcctacgggggccgggacgtcgcctgcgcgtctctcgttttcggacggctgcagcatcgcggtggggatcgaaagcgggggcttctgggacgcagctctggagacgcggcctcggaccagccatttcggtgtagaagtggcagcacggcagactggtcaaacaa

SEQ ID NO: 399 - DNA, 174 bp, Artificial Sequence
  Description of Artificial Sequence: Synthetic polynucleotide
ggagcctcatctcctcggtgtctgcgagattaatctctcatggccgctgcacaagaacctggcttttagctgaactaaggagaaagtcctacaacagtttggcgtgcaacatggggcttgagaaaggatgaggacggggacttggttgccttttccagtgacgaggaattgaca

SEQ ID NO: 400 - DNA, 174 bp, Artificial Sequence
  Description of Artificial Sequence: Synthetic polynucleotide
ggagctttctattggtcctgggtaccgagcatgggcgctgcgtcagtgcgcgctggcgcaaggttggtggaagtcgcgttgtgcaggttcgtgcccggctggcgcggcgtggtttcactgttacatgccttgaagtgatgaggaggtttctgttactatatgctacacagcagg

SEQ ID NO: 401 - DNA, 174 bp, Artificial Sequence
  Description of Artificial Sequence: Synthetic polynucleotide
ggcagaaaactaactgaaaaacgagaacctactgtatggttagtaatttcttccatgtcatacaagtattcgagaaatctgctaccttgattagtaagactgaacacattggttttgtcatttattcatggaggaagtccaccacccacttggggagcagaaggaaatttgcca

SEQ ID NO: 402 - DNA, 174 bp, Artificial Sequence
  Description of Artificial Sequence: Synthetic polynucleotide
ggcatagcaagatggcctgccctcaggtacaggaagaaggaatggaatcggaaggaagaaaattcattccagagacaaaatagctcccctcctctgttgtagctgttcctctggcaatacaaactttctgctttcaggttctgcagcattccagaccttgagcactgaatcagg

SEQ ID NO: 403 - DNA, 174 bp, Artificial Sequence
  Description of Artificial Sequence: Synthetic polynucleotide
ggccacagtgcgcatgtgtgcggctgtgctttggctcttcgggtaaagatggcggagcgcgggtacagcttttcgctgactacattcagcccgtctggtaaacttgtccagattgaatatgctttggctgctgtagctggaggagccccgtccgtgggaattaaagctgcaaat

SEQ ID NO: 404 - DNA, 174 bp, Artificial Sequence
  Description of Artificial Sequence: Synthetic polynucleotide
ggccagaaaagccaaacttaagaaatctgcctatgtacagaacaagtcaactaaggggttctcattaatctaccgtctgtgaatatcgttatttttcaggagaagcgctacaaagcagccactgtgcttactgaacggcctccccctgtatcgcttaattgagaaggtatacaa

SEQ ID NO: 405 - DNA, 174 bp, Artificial Sequence
  Description of Artificial Sequence: Synthetic polynucleotide
ggccccaggcagctggggtattccttaggggctgagtctcctggtatccctaagactgggcttggcttaggcactgaggactttttcctggccattatcctgcaggacagcagcgcagattccttctggaaccccaacgccttcgagacggattccgacctgccggctggatgg

SEQ ID NO: 406 - DNA, 174 bp, Artificial Sequence
  Description of Artificial Sequence: Synthetic polynucleotide
ggcgaggagaggcacaccactattgttttaatttgcttttacctgattcctggcagacttctgcgttatgacccggctgctgggctacgtggaccccctggatcccagctttgtggctgccgtcatcaccatcaccttcaatccgctctactggaatgtggttgcacgatggga

SEQ ID NO: 407 - DNA, 174 bp, Artificial Sequence
  Description of Artificial Sequence: Synthetic polynucleotide
ggcggaggtggggttagcttcagttgaccaaccatgccttgaggataaattggatgggatcagatgggaagatgtgacaagaagagaaatcctcctctatataggatgctctgctgtttcctaaggattttcagcaccttgccccaaaatcaaaatgatgcttcaacacccagg

SEQ ID NO: 408 - DNA, 174 bp, Artificial Sequence
  Description of Artificial Sequence: Synthetic polynucleotide
ggcggcgcaggggcggggctttacggacgcaagcacgtcgaagcgctgctcctggagccgcggagggtgcgggtttggctgcggtggtttctgtggcggttgctgtggcggagtttggaggttggagagaaatccaggtactcactagactggtaccttctgccaccatggggg

SEQ ID NO: 409 - DNA, 174 bp, Artificial Sequence
  Description of Artificial Sequence: Synthetic polynucleotide
ggcggggagaagccgagctgagcggatcctcacacgactgtgatccgattctttccagcggcttctgcaaccaagcgggtcttacccccggtcctccgcgtctccagtcctcgcacctggaaccccaacgtccccgagagtccccgaatccccgctcccaggctacctaagagg

SEQ ID NO: 410 - DNA, 174 bp, Artificial Sequence
  Description of Artificial Sequence: Synthetic polynucleotide
ggcggttggtgcggcctccattgttcgtgttttaaggcgccatgaggggtgacagaggccgtggtcgtggtgggcgctttggttccagaggaggcccaggaggagggttcaggccctttgtaccacatatcccatttgacttctatttgttgtttacttctggtttagtgtgaa

SEQ ID NO: 411 - DNA, 174 bp, Artificial Sequence
  Description of Artificial Sequence: Synthetic polynucleotide
ggctaccatggtaacaggttccagggtaacagaggagggagctgggtcctgtttactcccagtcctgccgatgaggattctgaccgtagacactgaattgtcccgtacctatccgtgctctttctgtgttctcaccagggctgagctcgaactgccacctctgccagcaggacc

SEQ ID NO: 412 - DNA, 174 bp, Artificial Sequence
  Description of Artificial Sequence: Synthetic polynucleotide
ggctctcaggaggtccttgttccagggaacagctgcttctctggggctgggctctactccctgcagcccctcgcactacccagctggaaccagggacaacgcctgagtccaaccctcgtgtctattttccagaaaacgggcaatgctgtgagagccattggaagactgtcctct

SEQ ID NO: 413 - DNA, 174 bp, Artificial Sequence
  Description of Artificial Sequence: Synthetic polynucleotide
ggctgccagcttcctttcggcccctgcttttgtgctccctccgctcccaaactgtacctgtcacagaccaggaaaaatgtttgctgtgctgcgtctgttggcgagtcccctcctcacccggttcccttcctctgcatcctttcctcagcttgagaaacacctctttgccccgtc

SEQ ID NO: 414 - DNA, 174 bp, Artificial Sequence
  Description of Artificial Sequence: Synthetic polynucleotide
ggctgcggccccggctccggcccccgcaggagcagcaccccccggggaaagacattttctgctcccaccgagttggcagggcctgcttcctgaatctcctgggtgtgtcttaactgccagtcccagcacctcctgaaagccccactctcctccagtggtcacagtggaaggatc

SEQ ID NO: 415 - DNA, 174 bp, Artificial Sequence
  Description of Artificial Sequence: Synthetic polynucleotide
ggcttccgggatgtggcggggcctttgtctctggctgcagttggagctctgcgtctcgtcttcgttcttctgtgtcctctgctgctagaggtccagcctctgtggctctgtgacctgcgggtattgggggatccacagctaagacgccaggaccccccggaagcctagaaatgg

SEQ ID NO: 416 - DNA, 174 bp, Artificial Sequence
  Description of Artificial Sequence: Synthetic polynucleotide
ggcttttagctggcttgtctgtcataattcatgattcggggctgggaaaaagaccaacagcctacgtgccaaaaaaggggcagagtttgatggagttgggtggacttttctatgccatttgcctccacacctagaggataagcacttttgcagacattcagtgcaagggagatc

SEQ ID NO: 417 - DNA, 174 bp, Artificial Sequence
  Description of Artificial Sequence: Synthetic polynucleotide
gggacaaggcgtcggttctcgcctgagggccaaaccttgcccctgcccaccttcctcacccccgccatttccaggactcacatccaaaggcgacagcaccaggatttgctcccgcctttggcacagaggaggacgggtccctctctcagcctggccagtctttcccagggcttg

SEQ ID NO: 418 - DNA, 174 bp, Artificial Sequence
  Description of Artificial Sequence: Synthetic polynucleotide
gggagtgcgagccacaggccaggcactctccttctcccattagctcagccgtggcatcggacttgcagcttcattttgggctgccttagccatgaagctccttttgctgactttgactgtgctgctgctcttatcccagctgactccaggtggcacccaaagatgctggaatct

SEQ ID NO: 419 - DNA, 174 bp, Artificial Sequence
  Description of Artificial Sequence: Synthetic polynucleotide
gggataaacggagctggacgactcagtctcttggtctgtggctgctgcggttacctggatgggcgagcacctctgaggctggctttgttacctgggcaataagggactagcagttcagccgttttctatgcctgctggatttgtttgtatttgttcccagccactgctcatgta

SEQ ID NO: 420 - DNA, 174 bp, Artificial Sequence
  Description of Artificial Sequence: Synthetic polynucleotide
gggcacgagggcagagccagttcctagcgcagagccgcgcccgccatgagggagatcgtgcacatccaggcgggccagtgcgggaaccagatcggcaccaagttttgggaagtgatcagcgatgagcacggcatcgacccggccggaggctacgtgggagactcggcgctgcag

SEQ ID NO: 421 - DNA, 174 bp, Artificial Sequence
  Description of Artificial Sequence: Synthetic polynucleotide
gggcacttggagttgtcttaggactgatgtctgaattaactaaatgaacttgtctggtttgcagagtgctgatggcagagattggtgaggatttggataaatctgatgtgtcctcattaattttcctcatgaaggattacatgggccgaggcaagataagcaaggagaagagtt

SEQ ID NO: 422 - DNA, 174 bp, Artificial Sequence
  Description of Artificial Sequence: Synthetic polynucleotide
gggctctccggcagcggatctgcgcagaagcgttccgtgcgtgcaagtgctgcgaaccacgtgggtcccgggcgcgtttcgggtgctggcggctgcagccggagttcaaacctaagcagctggaaggaaccatggccaactgtgagcgtaccttcattgcgatcaaaccagatg

SEQ ID NO: 423 - DNA, 174 bp, Artificial Sequence
  Description of Artificial Sequence: Synthetic polynucleotide
gggctggagacgggacccgacggtgactgcgcaagcaaggaatagtgtctggagccggtccagctgaaggaagggtgagcagagagtgcaagcaggacccttgtcggtgggtgaacattttgctccaaaagggatccttggccctgcgcaggtggatttcagtgtgttctttgg

SEQ ID NO: 424 - DNA, 174 bp, Artificial Sequence
  Description of Artificial Sequence: Synthetic polynucleotide
ggggagggaggcggttagcgggctttagcgccttttctggcggcggtagatttgaagcgcttcaaaggaccggacccagagaagaggaaaactctaccggtgcaggagcacagggatcagttgtccttgtttttttttggtcttttcttcatttgaagattaagtattggagcc

SEQ ID NO: 425 - DNA, 174 bp, Artificial Sequence
  Description of Artificial Sequence: Synthetic polynucleotide
ggggccgcgacctcggctcgagaaggtgctttagtctgaagatggcggcctcagcagcgagaggtgctgcggcgctgcgtagaagtatcaatcagccggttgcttttgtgagaagaattccttggactgcggcgtcgagtcagctgaaagaacactttgcacagttcggccatg

SEQ ID NO: 426 - DNA, 174 bp, Artificial Sequence
  Description of Artificial Sequence: Synthetic polynucleotide
gggggaggggcggtcctaggaggagcaggagcctggtgctttctatcagggagggatcacaccggctcactgctgagccggccaggcagacacaggcttgggctctgctgggcatcatacttgtcactgggtaaacagtttgcccacttaccgcaggatgaagctgcttgccag

SEQ ID NO: 427 - DNA, 174 bp, Artificial Sequence
  Description of Artificial Sequence: Synthetic polynucleotide
ggggggccatagttctccctgattgagacttgcctgctgctgtgaccactggtcttgtcctcttctccagcatggtgtgtctgaagctccctggaggctcctgtatggcagcgctgacagtgacattgacggtgctgagctccccactggctttggctggggacacccaaccac

SEQ ID NO: 428 - DNA, 174 bp, Artificial Sequence
  Description of Artificial Sequence: Synthetic polynucleotide
ggggggcttgtgggtcctcctccccctcccactgacaactgccccaactgctcttcccgccccggtcacagtgaaaatgtagacggggtcgttgtccactatgttaggtcttaatggtgggaggacgcccgagtgctcggcccgtttcaccccgaggaggaaggacactgggtc

SEQ ID NO: 429 - DNA, 174 bp, Artificial Sequence
  Description of Artificial Sequence: Synthetic polynucleotide
ggggtctcaagtaggaggcctccccatcacccccaccccagccccccaccacccccggcctaagcagctaccatggcccaggtggccggcgcggcgttgtcccaggcgggttggtatctttcagatgaaggcattgaagcttgcacaagctctccagacaaagtcaatgtaaat

SEQ ID NO: 430 - DNA, 174 bp, Artificial Sequence
  Description of Artificial Sequence: Synthetic polynucleotide
gggtacaaatgtattttggatcaaagaaactccagtattcaaagataggaactgacaggattttaggtcactttgtaggtcaccacctagaggggaggaagacctcgctttggagagtgggaataaaacgctcgtggaaaagggtacacgcttttctgggaaagtgaggccacc

SEQ ID NO: 431 - DNA, 174 bp, Artificial Sequence
  Description of Artificial Sequence: Synthetic polynucleotide
ggtatgagagcttccagggagacccgccaagatctccaggcaggccgggccaggctctctgggattccggactggcttcgcccaactggaaccccctcgatgagggggccccaggcagaccttatatgagcatcccagccatcactcttccacctgctccttagagaagggaag

SEQ ID NO: 432 - DNA, 174 bp, Artificial Sequence
  Description of Artificial Sequence: Synthetic polynucleotide
ggtcgcggctgtggccgggggaagtgaatggttttacccagagggccctgcgccgcctttctccgctggcaacggcgccgctccccgctcctcctccccagccatggcgttcacgttcgcggccttctgctacatgctggcgctgctgctcactgccgcgctcatcttcttcgc

SEQ ID NO: 433 - DNA, 174 bp, Artificial Sequence
  Description of Artificial Sequence: Synthetic polynucleotide
ggtctcagggttgaagagggggaggcctcagacttctcgctggcctgggattcctccgtgacagcagcaggaggcctagaaggagagccagagtgcgatcagaaaaccagccgtgcgctggaagacaggaacagcgtgacaagtcaagaggagagaaatgaggatgatgaagac

SEQ ID NO: 434 - DNA, 174 bp, Artificial Sequence
  Description of Artificial Sequence: Synthetic polynucleotide
ggtgagtggcccctgctggaccgtggatcccgggcgggcgtgcgggcggcagcgtacgaggccttctactcgcccgggtgtccggtgcctcgcttctccctgggaccctgtcgtcaacatcgaggcctgccagtgagcttctaccatcatggacctattgttcgggcgccggaa

SEQ ID NO: 435 - DNA, 174 bp, Artificial Sequence
  Description of Artificial Sequence: Synthetic polynucleotide
ggttctagctgatcatgtgacaatccaagatggcggtgcccggcgaggcggaggaggaggcgacagtttacctggtagtgagcggtatcccctccgtgttgcgctcggcccatttacggagctattttagccagttccgagaagagcgcggcggtggcttcctctgtttccact

SEQ ID NO: 436 - DNA, 174 bp, Artificial Sequence
  Description of Artificial Sequence: Synthetic polynucleotide
ggttgacccaactgctgctctagaaacttctcctcccgctcctttgggggctacctgtactacccaggctcctaccccagcagcctggtctacagcactgccctctgctctcccagcacctgccagctgcgttcctctctctacagggactgtcagaagacctgctgggagccc

SEQ ID NO: 437 - DNA, 174 bp, Artificial Sequence
  Description of Artificial Sequence: Synthetic polynucleotide
ggtttcattgtgttggccaggctggtctcgaactcctgacctcgtgatccgcccgccttggcctcccaaagtgctaggattacaagtgtgagccaccgcgtccggcctttcaaatggtatttttgattttcctcttccagtccttaaagcagctgatttagaagaatacaaatc

SEQ ID NO: 438 - DNA, 174 bp, Artificial Sequence
  Description of Artificial Sequence: Synthetic polynucleotide
ggtttgtaggagtcctgaagtgagaaaggttctgatgtaggctctttctgggtgccagcattattaaagtattgtttatagttttcacttttccttcccaacactggagcaacattcaaaagcccattccccaggaaaaccctccctttcctttgcccacagttccaagatgag

SEQ ID NO: 439 - DNA, 174 bp, Artificial Sequence
  Description of Artificial Sequence: Synthetic polynucleotide
gtacttcatagactttatcatacttcgtagcatccagtatgttttctttgctaagattattgattttgtattgaagggtcccatgtccatcgttttcaatgctttatctccagggttggagcatgcctgctgtggcagaggtaaaacttcgagatgatcaatatacactggaac

SEQ ID NO: 440 - DNA, 174 bp, Artificial Sequence
  Description of Artificial Sequence: Synthetic polynucleotide
gtagaggcggaagttgaggggactgacgcagatgggggaattttgcctcgatggcactttcctgtccgcgactccgcccccaccagaggggctaggctctgggattcaagatggaggcgctgagtcgagctgggcaggagatgagcctagcggccctgaagcaacacgacccct

SEQ ID NO: 441 - DNA, 174 bp, Artificial Sequence
  Description of Artificial Sequence: Synthetic polynucleotide
gtagcgcggtccccatacggctgtaatcagtgaattagaaaaaaaacaccctagcagcgatattctatgatagattttttttcctctgcgctcgcctttttcctaggccttgcccccccaaagcccctccaaaagagggaactttttctctgagggggctccaaggagaaggcc

SEQ ID NO: 442 - DNA, 174 bp, Artificial Sequence
  Description of Artificial Sequence: Synthetic polynucleotide
gtagttcttctcgatcgtgtcagtttgtaaggcgagggcggaagttggattcctggcctgagaatattaggcgtagttttccagtttttggcaaagcggaaatacttaaggcccctgggttgactgggttctttgttttatctaccggcttctgctttacgacaggtcacaaac

SEQ ID NO: 443 - DNA, 174 bp, Artificial Sequence
  Description of Artificial Sequence: Synthetic polynucleotide
gtatgaggatggtagaagctctcgtcgaaccagatggatgaagaccactaacggcttttgtttcctctggtaacagcaagagacagagcgacatgagagattggaccgcgggctgcactggagaatttactggtaggataattcatccctaaagagattgaagtgagcttcaga

SEQ ID NO: 444 - DNA, 174 bp, Artificial Sequence
  Description of Artificial Sequence: Synthetic polynucleotide
gtattgatgtcaagctgaaccatcgtaggaagttgaaagccttagaaagaggacttggtaaagtttttggattatcttgaaactctggcaagatggccaagtatggagaacatgaagccagtcctgacaatgggcagaacgaattcagtgatatcattaagtccagatctgatg

SEQ ID NO: 445 - DNA, 174 bp, Artificial Sequence
  Description of Artificial Sequence: Synthetic polynucleotide
gtcaactacagctgttctccttcttttcccagtatcctttgggtgcagtgagacaccaggagagctgctgctttgggggatggacaggggcagcaggaatgcctttgtgttttcgcagtgaacctccttggcctgggcgaagctgtgtggaccaagcaagtcaggagtgtggcc

SEQ ID NO: 446 - DNA, 174 bp, Artificial Sequence
  Description of Artificial Sequence: Synthetic polynucleotide
gtccttcccacccttagtcccaggcatctgactaccgggaacctcagccagagtccgggagccccccaccccgtccaggagccaacagagcccccgtcttgctggcgtgagaatacattgctctcctttggttgaatcagctgtccctcttcgtgggaaaatgaaccagaagac

SEQ ID NO: 447 - DNA, 174 bp, Artificial Sequence
  Description of Artificial Sequence: Synthetic polynucleotide
gtctcccggggattttgtatatattttttaacttccgtcagggctcccgcttcatatttccttttctttccctctctgttcctgcacccaagttctctctgtgtccccctcgcgggccccgcacctcgcgtcccggatcgctctgattccgcgactccttggccgccgctgcgc

SEQ ID NO: 448 - DNA, 174 bp, Artificial Sequence
  Description of Artificial Sequence: Synthetic polynucleotide
gtctgacttgagtccctgctgctgcagtgcacgccccttcggcagccagggtggggcccagacccaacctggcccctcctgcccccaccccgcctttgggtcgctgacccccaggctgtggtgagggtctgagagctggtaccacggagcctgggcaacctcctccgcccaccc

SEQ ID NO: 449 - DNA, 174 bp, Artificial Sequence
  Description of Artificial Sequence: Synthetic polynucleotide
gtctgcgtcagttggtcacgtggttgttcggagcgggcgagcggagttagcagggctttactgcagagcgcgccgggcactccagcgaccgtggggatcagcgtagtcttctgtgcttcaccatctacataatgaatcccagtatgaagcagaaacaagaagaaatcaaagaga

SEQ ID NO: 450 - DNA, 174 bp, Artificial Sequence
  Description of Artificial Sequence: Synthetic polynucleotide
gtctggagccggtgctctgcggcggggcgggagggctcgcatccccatagtgctgggttacagtgaaggtacgccccgcgctctgctctggagaggcagggtgggatagggaacgtctcgagtggcgcccgcagtcatggtggtgttcgttggccgccgcctcccggcgctcct

SEQ ID NO: 451 - DNA, 174 bp, Artificial Sequence
  Description of Artificial Sequence: Synthetic polynucleotide
gtctggcagctattttgctttaaccgatgacagaccgtggcaaggaggtgtacagccctgactttcatagcctcggaggagaaggtcttggtggccgacaagtctggagacgtctactccttttcggtgctggagccacacgggtgtggccgtctagagctggggcacctgtct

SEQ ID NO: 452 - DNA, 174 bp, Artificial Sequence
  Description of Artificial Sequence: Synthetic polynucleotide
gtctttaaagggcaattgtcgacactctgcaaacataccgatttgttgtctgcccactttggagtcttcaatctgggcagtaactatttaccctttttcctgctagcctgtccccctctctggattgaagtcacctgctaagacaatggactaccgaccagactcccggaaatc

SEQ ID NO: 453 - DNA, 174 bp, Artificial Sequence
  Description of Artificial Sequence: Synthetic polynucleotide
gtgatgctcggactagagcccaggcatttttaactcctgttccctcaccagcctgcaggaaatggaaaaggagtaaaagtccctcgcaatttccgactgttggaagaactcgaagaaggccagaaaggagtaggagatggcacagttagctggggtctagaagatgacgaagac

SEQ ID NO: 454 - DNA, 174 bp, Artificial Sequence
  Description of Artificial Sequence: Synthetic polynucleotide
gtgcagaactgccagtcccctgacacgctgtgccccacccactgcagcccagtgctgaatgaaccctgcccagaggtgtctgtagtgagcttctgccctagtgacttttgagccggccaggttgcagcgcggacacactcgcaggtcgctgtggccccagcctcgcctgacaga

SEQ ID NO: 455 - DNA, 174 bp, Artificial Sequence
  Description of Artificial Sequence: Synthetic polynucleotide
gtgcctggaaaggaattgttttggcctaggatcatccagctagacttcgggctccttgaggatattcagttttgtatgtttgaatatcctctcaccatgttcagcataaagtaccattcttaatgattatcctcaacaagacaggtgtgagagggttgctgttgtattgcaatc

SEQ ID NO: 456 - DNA, 174 bp, Artificial Sequence
  Description of Artificial Sequence: Synthetic polynucleotide
gtgctgccctaggctgcatgagtcgaagcaagcgtgtttccttcccgccaggcaagtgcccttagaaaccgggccccgcccccttcctggcctgcattcccatcccctctcccggggcggaggtgaggacctccttggttcctttggttctgtcagtgagccccttccttggcc

SEQ ID NO: 457 - DNA, 174 bp, Artificial Sequence
  Description of Artificial Sequence: Synthetic polynucleotide
gtgcttattaacttttctctcagtccctcactctgctgctcttctcgcctcatctcacataagggaaaactcaggctccaaaagcaaagtgattccaccaagatgacaatggaatcgggacctggtgtccaagcctggtcctcgcacgaggtagatactccctgagatgctggg

SEQ ID NO: 458 - DNA, 174 bp, Artificial Sequence
  Description of Artificial Sequence: Synthetic polynucleotide
gtggaacctcataaaatctccaagaaacatcattcacccatactgactagtttcacatctctttgtttgaagaaaacaggtctgaaacaaggtcttacccccagctgcttctgaacacagtgactgccagatctccaaacatcaagtccagctttgtccgccaacctgtctgac

SEQ ID NO: 459 - DNA, 174 bp, Artificial Sequence
  Description of Artificial Sequence: Synthetic polynucleotide
gtgggagagccgggctggagtcacagtttttattttgctagggaggtagtcagtggcgcacaaagggtaacaagcagtgatagtggggatgctttccattttaggaaacttttcctaaaaggaagtggcaattttaactaatctcccctccgccgctcccagctgccgctccag

SEQ ID NO: 460 - DNA, 174 bp, Artificial Sequence
  Description of Artificial Sequence: Synthetic polynucleotide
gtgggggaaagtatggctgcgatgatggcatttcttaggacacctttggattaataatgaaaacaactactctctgagcagctgttcgaatcatctgatatttatactgaatgagttactgtaagtacgtattgacagaattacactgtactttcctctaggtgatctgtgaaa

SEQ ID NO: 461 - DNA, 174 bp, Artificial Sequence
  Description of Artificial Sequence: Synthetic polynucleotide
gtggttctctctaacaatgctgctcaagcctgttttaaagttaatgtcagtaatttgatttgattgttccttccaggtgtctcaaaggctgttgagcacatcaataaaactattgcgcctgccctggttagcaagaaactgaacgtcacagaacaagagaagattgacaaactg

SEQ ID NO: 462 - DNA, 174 bp, Artificial Sequence
  Description of Artificial Sequence: Synthetic polynucleotide
gtgtgtggaggggaccctgtggttagcagcagctatcgcagcgtcggatgttcagagcagcagaagccggcgtcgtcggatgttgtgttgcccgccaccatgagctacacaggctttgtccagggatctgaaaccactttgcagtcgacatactcggataccagcgctcagccc

SEQ ID NO: 463 - DNA, 174 bp, Artificial Sequence
  Description of Artificial Sequence: Synthetic polynucleotide
gttaaaccaacaagccgatagaaaaaggtagttatcaagagatttttaaaacttcaaccctttttctcttatagttagtgaagagagtagaatatctccagttttggctgacatctctacaacctgaacaattggcttaaacttcacttgggattcccggttgcttgttttagc

SEQ ID NO: 464 - DNA, 174 bp, Artificial Sequence
  Description of Artificial Sequence: Synthetic polynucleotide
gttatacacgagatcagagtctaattttatcttggcaaagaaaaagagaatttgaggactgggaattttccattcagggtaatatcaacaagctggtccactgagaggagagcaagcctgttgaaattgtttttgctttcacagctttttcctgtccggggagcaggagaagcc

SEQ ID NO: 465 - DNA, 174 bp, Artificial Sequence
  Description of Artificial Sequence: Synthetic polynucleotide
gttattggttggcagttcagccaatgagcgggcctgttactagtttgcggcatcctgtggtataggggaagcgctccgggcctggaatccctacgcgtccctttgggtttagcacgatgagctcaatcggcactgggtatgacctgtcagcctctacattctctcctgacggaa

SEQ ID NO: 466 - DNA, 174 bp, Artificial Sequence
  Description of Artificial Sequence: Synthetic polynucleotide
gtttgagcagcattgttagagcctgtggaaaacactttacaactgtgtaactgtcttcatctttacagaggaatagtctacaaaggaagacttgtaacctggagaagagacctgtcatttactccatcctttatagtgatgctacaggacgaagaggaatggataaaaacattg

SEQ ID NO: 467 - DNA, 174 bp, Artificial Sequence
  Description of Artificial Sequence: Synthetic polynucleotide
gtttggctctgtttgagcaccccgggatgattggtggtggggtgtggctgaaggtgaattggaacagtgcactcagagccaggttgcaagagtgctgcatgctcctcagggattggctccggccaagtgccccagcctccttttctggagaattctgtttttgacttgggcccc

SEQ ID NO: 468 - DNA, 174 bp, Artificial Sequence
  Description of Artificial Sequence: Synthetic polynucleotide
gtttggggccagagtgggcgaggcgcggaggtctggcctataaagtagtcgcggagacggggtgctggtttgcgtcgtagtctcctgcagcgtctggggtttccgttgcagtcctcggaaccaggacctcggcgtggcctagcgagttatggcgacgaaggccgtgtgcgtgct

SEQ ID NO: 469 - DNA, 174 bp, Artificial Sequence
  Description of Artificial Sequence: Synthetic polynucleotide
taaaagggttagatttcagtctatagacgatcagtgggaaggcctttcctaggaggtaaccagaacagagagctgtaaactccgtgaatgcaagaggctgcttctgttacctgagtggttctcactcatctttgccttccttacctcgtgatctcaccattccagattgaaatc

SEQ ID NO: 470 - DNA, 174 bp, Artificial Sequence
  Description of Artificial Sequence: Synthetic polynucleotide
taactgacgctaccgtcgcggccgccggcaagttcctttactgtgttttcttggttcagccttgaagtgagtcgtggacgatcctctctcagcgtccagcctagacggcggtgttgctccggcagcgttcctgggagccgagggccagagactaagttgtgggacgacttcagc

SEQ ID NO: 471 - DNA, 174 bp, Artificial Sequence
  Description of Artificial Sequence: Synthetic polynucleotide
taaggcggcgtttctgggcgcagccgtgtcgctcctggtttccatcgtgtgggaagaacggagtaacgagtctcacgcagaaaaaggtcttgagagcaccttgtggcgcacccagtgtaactgtgacgatcaaccatttttgtgttgtcctcccccacctgccagaagccaacc

SEQ ID NO: 472 - DNA, 174 bp, Artificial Sequence
  Description of Artificial Sequence: Synthetic polynucleotide
tacaggacttgacccaatgaaagaagcatatggcacttgtgaagataaatgttactcctccctttttaattggaacttctgcttaggacctgtgtatgacgtttcacctgtgatctgttctttcggtagccactgactttgagttacaggaaggtctccgaagatttgtgtcaa

SEQ ID NO: 473 - DNA, 174 bp, Artificial Sequence
  Description of Artificial Sequence: Synthetic polynucleotide
tacatcttttagtgcgtatgttctgtccacccagctactggttcatttgagtagatcggagtcagatgagtacatgtttacgggaggcgcttggttacgggatccagataggaatctttatctgagctgcttgtcagtttgttcgtctgtccctaggtctgtctgctatcagct

SEQ ID NO: 474 - DNA, 174 bp, Artificial Sequence
  Description of Artificial Sequence: Synthetic polynucleotide
tactaccacctcctttgcgggtaaacagacatggccggcgaaggagatcagcaggacgctgcgcacaacatgggcaaccacctgccgctcctgcctgagagtgaggaagaagatgaaatggaagttgaagaccaggatagtaaagaagccaaaaaaccaaacatcataaatttt

SEQ ID NO: 475 - DNA, 174 bp, Artificial Sequence
  Description of Artificial Sequence: Synthetic polynucleotide
tagacggaacttcgcctttctctcggccttagcgccatttttttgggtgagtgttttttggttcctgcgttgggattccgtgtacaatccatagacatctgacctcggcacttagcatcatcacagcaaactaactgtagcctttctctctttccctgtagaaacctctgcgcc

SEQ ID NO: 476 - DNA, 174 bp, Artificial Sequence
  Description of Artificial Sequence: Synthetic polynucleotide
tagacttgaatatgcctctgggcaaagaagcagagctaacgaggaaagggatttaaagagtttttcttgggtgtttgtcaaacttttattccctgtctgtgtgcagaggggattcaacttcaatttttctgcagtggctctgggtccagccccttacttaaagatctggaaagc

SEQ ID NO: 477 - DNA, 174 bp, Artificial Sequence
  Description of Artificial Sequence: Synthetic polynucleotide
taggctagggtcattacatagataatttgcctgctgtgtaaataaaaatgaaattgtttaaattttgtgcaagagaaagtgaaaataaggagttacgatttgtttgttagagaaagtggaggccattggaatgacagtttttggaagtgtggagcagtttggctaagaatagga

SEQ ID NO: 478 - DNA, 174 bp, Artificial Sequence
  Description of Artificial Sequence: Synthetic polynucleotide
tatagcaagcaagaagtggcagggcgcgcaccggctgtcgccaagtgctgttcaactcagggagccggggcttcgctccgtccctcccccggcttccagagctttttggggttggagggtgggaggccaggggcgttctcacagctgtgtgtcctctttcccatcctgcgcaga

SEQ ID NO: 479 - DNA, 174 bp, Artificial Sequence
  Description of Artificial Sequence: Synthetic polynucleotide
tatatgatagttcgtttatttcacatctttgacagcatttagtgttgtcagggttttttttgtttgttttagacattttagtagtctggctcttgctgattgaattcctttggtgcagtttagcatgttcctctgtgttctgcatctcctgtagtgtaatgttcaagctcagaa

SEQ ID NO: 480 - DNA, 174 bp, Artificial Sequence
  Description of Artificial Sequence: Synthetic polynucleotide
tcaaaggaagaggccccttaatatcctggaataatgggacccatccccgtaatcagtgaatctcatccacccgcttgccagcttctacccgcagcaagtagaagctaagtcctggctcaaatctcttccctccctccctctcccagctgtcagtgcttttggacttgtgctcag

SEQ ID NO: 481 - DNA, 174 bp, Artificial Sequence
  Description of Artificial Sequence: Synthetic polynucleotide
tcaatcgccttttatctctggccctgggacctttgcctattttctgattgataggctttgttttgtctttacctccttctttctggggaaaacttcagttttatcgcacgttccccttttccatatcttcatcttccctctacccagattgtgaagatggaaagggtccaaccc

SEQ ID NO: 482 - DNA, 174 bp, Artificial Sequence
  Description of Artificial Sequence: Synthetic polynucleotide
tcacacctgccaagcatcacacctgcgatgcctgcacgagctgggtggggtccgcgcagctgcagtaagggggcgacccggcgtctgttagtcggcggttcatctccttcgtgcctcgatgagctttaacgccattttcctccattctctttcttcacctcttgagtttccaag

SEQ ID NO: 483 - DNA, 174 bp, Artificial Sequence
  Description of Artificial Sequence: Synthetic polynucleotide
tcaccacggcggcagccctttaaacccctcacccagccagcgccccatcctgtctgtccgaacccagacacaagtcttcactccttcctgcgagccctgaggaagccttctttccccagacatggccaacaagggtccttcctatggcatgagccgcgaagtgcagtccaaaat

SEQ ID NO: 484 - DNA, 174 bp, Artificial Sequence
  Description of Artificial Sequence: Synthetic polynucleotide
tcaccgaggtagagagaaaagggcagtagccctagagactattgcgacacagtgtgcccctcataagtttttccagggaggggttctgtactgagttgacgccccaggagctgagcaccaggctttgcatccttgggaactcagcaaacgtttgttcagccaattgcaggtagc

SEQ ID NO: 485 - DNA, 174 bp, Artificial Sequence
  Description of Artificial Sequence: Synthetic polynucleotide
tcactcactcacacacctcccccagctcacctcctccccactccagcatggccgcctccaccatgtccatctgctccagcgcctgcaccaactcctggcaggtggacgactgcccagagagctgctgtgagctcccctgcggcacccccagctgctgtgccccagccccctgcc

SEQ ID NO: 486 - DNA, 174 bp, Artificial Sequence
  Description of Artificial Sequence: Synthetic polynucleotide
tcactgttcagcctcggggcccaggcgcttcctggaatctctccttggccggggttaaaatgcagttcccgctcaaaatgcttataggttgatagaagtccagatcctgaggaaatctccagctaaatgctcaaaatataaaatactgagctgagatttgcgaagagcagcagc

SEQ ID NO: 487 - DNA, 174 bp, Artificial Sequence
  Description of Artificial Sequence: Synthetic polynucleotide
tcagatggtcactagaggctgctgcttaccagcggctctgctgggcccagacaaccacccagcaaaccaaactcaaccctggatgaatctgtggcccaaacacgcagtggatcccacagtcggtgctaacagttctctctctacctagtggacgagcgccttcccctggtgccg

SEQ ID NO: 488 - DNA, 174 bp, Artificial Sequence
  Description of Artificial Sequence: Synthetic polynucleotide
tcagcatacgtttatgaagattacccccacagctgtgtggcaagtgatcaaaaaggaacaggaccagagaagagcaggaaaactggtcagaaagcaggcgccctaaccctggattgccccctgtgggtcactttctcagtcattttgagctcagcctaatcaaagactgaggtt

SEQ ID NO: 489 - DNA, 174 bp, Artificial Sequence
  Description of Artificial Sequence: Synthetic polynucleotide
tcatagtgggactatattcattcctccaaagttacagctgctctaaatctttcatcatcaaccaaggtggatctcaagagtggcctcgaagaatgtgctgtggcattgaacttatttctaagcaacaaatttacagacgccttagaattgcttcgcccctgggctaaggagagt

SEQ ID NO: 490 - DNA, 174 bp, Artificial Sequence
  Description of Artificial Sequence: Synthetic polynucleotide
tccagaggacgccacaccccacatttgaatatttttttttcttgtcacgcaaacttcctgggcaggaactccaagggctcaatggacgggaagcagggtccttaaatacgtcccctcttggctcttgccgttccaggagccccagttaccgggagaggctgtgtcaaaggcgcc

SEQ ID NO: 491 - DNA, 174 bp, Artificial Sequence
  Description of Artificial Sequence: Synthetic polynucleotide
tccaggttcacacaactggaacccatctccaggaacaaacagctggaacccatctcccgttgaagggaaactgccagatttttgtaagattcttcctcctgggcacctctaagatactgatggctctgcagaggacccattcattgcttctgcttttgctgctgaccctgctgg

SEQ ID NO: 492 - DNA, 174 bp, Artificial Sequence
  Description of Artificial Sequence: Synthetic polynucleotide
tcccaaccggcttccccgccccatttggtgggggctggcccttggccctccaactcctttaccctacatgcctgagaagccagggaccaagatggatcttctcctcgacatcagctaagcctggaggactcttcccctcagagaccatggagagggacagccacgggaatgcat

SEQ ID NO: 493 - DNA, 174 bp, Artificial Sequence
  Description of Artificial Sequence: Synthetic polynucleotide
tcccacccccagcctggggcctctgggagccttggtcctgagcagccaacacaccagcccagacagctgcaagtcaccatggacgctgaaggcctggcgctgctgctgccgcccgtcaccctggcagccctggtggacagctggctccgagaggactgcccagggctcaactac

SEQ ID NO: 494 - DNA, 174 bp, Artificial Sequence
  Description of Artificial Sequence: Synthetic polynucleotide
tcccagacccggggctctccaaggccccgcgcttccgagctccgcgcaaactctggcttctcttgtacgacagaggtggtttgctcttccgttgccccgtggcttcagctcatctttggcaggaaggcgaggcttccgcccggcacaggggatgtccagctcgccgctgtccaa

SEQ ID NO: 495 - DNA, 174 bp, Artificial Sequence
  Description of Artificial Sequence: Synthetic polynucleotide
tcccggggctacgaggcggaagcgaaggcagacgcagtctccgtcgttgacgttagtcgcagtcttcgctgctaacgttttgttatgagttgctaaaatggtgaaatgctgctccgccattggatgtgcttctcgctgcttgccaaattcgaagttaaaaggactgacatttca

SEQ ID NO: 496 - DNA, 174 bp, Artificial Sequence
  Description of Artificial Sequence: Synthetic polynucleotide
tccctggctcgcctcgcgcctgccggcggatccgtggtcatgccaacccagcagccggctgcgccgagtactcgtgcccccaaaccctcccggagtctctctggctcactttgtgccctgttttctgatgcagactcgggatccgggatgaaggcggagcttccccctgggcct

SEQ ID NO: 497 - DNA, 174 bp, Artificial Sequence
  Description of Artificial Sequence: Synthetic polynucleotide
tccgacggggctggcccggtttcctggcgacgcggccctgcaggcggttgcgttccccgtcgttaccctctttctcttcccgacgcgtgagttaggccgtaatgccttggctgctctcagcccccaagctggttcccgctgtagcaaacgtccgcggcctctcagggtcttact

SEQ ID NO: 498 - DNA, 174 bp, Artificial Sequence
  Description of Artificial Sequence: Synthetic polynucleotide
tccgcccgcctcggcctcccaaagtgctgggattacaggcgtgagccaccgtgcccggccgggaggtcactttaaggagggctgtccaactgcaaggagccgcaagcaggaagtgaaaccacagcacttcaaaaaaagagggagactgggacaagcgtatctaagaggctgaac

SEQ ID NO: 499 - DNA, 174 bp, Artificial Sequence
  Description of Artificial Sequence: Synthetic polynucleotide
tccgcttcggtttctgttgcgggacccggggtgtctcctagcgcaaccggaactagccttctgggggccggcttcctttatctctggcggccttgtagtcgtctccgagactccccacccctccttccctcttgaccccctaggtttgattgccctttccccgaaacaactatc

SEQ ID NO: 500 - DNA, 174 bp, Artificial Sequence
  Description of Artificial Sequence: Synthetic polynucleotide
tccggatgagaggctaagccataatagaaagaatggagaattattgattgaccgtctttattctgtgggctctgattctccaatgggaataccaagggatattatttttacagatggttttccatactggaacccaaaggtaaagacactcaaggacagacatttttggcagag

SEQ ID NO: 501 - DNA, 174 bp, Artificial Sequence
  Description of Artificial Sequence: Synthetic polynucleotide
tccggccacggtgatgacgagtctccgtcaacctcgtctggcacagctgggacctcctctgtgccagagctacctgggttttactttgaccctgaaaagaaacgctacttccgcttgctccctggacataacaactgcaaccccctgacgaaagagagcatccggcagaaggag

SEQ ID NO: 502 - DNA, 174 bp, Artificial Sequence
  Description of Artificial Sequence: Synthetic polynucleotide
tcgcagactcctaagtggtctggaacctaacctgcagtgtctctgagcttctggcaagtatgaggcaaggatttcacagaagaacttggagcaaaaattcccactgtcatagctataggctgtccagtcttgagggagctgcaggaacaggaaaaagagaccttcagagaagac

SEQ ID NO: 503 - DNA, 174 bp, Artificial Sequence
  Description of Artificial Sequence: Synthetic polynucleotide
tctccttacgtcacttcctctccagcccctgcgtaatcgataaggaaacccggacgctgctgcccctttctttttttcaggcggccgggaagatggcggacattcagactgagcgtgcctaccaaaagcagccgaccatctttcaaaacaagaagagggtcctgctgggagaaa

SEQ ID NO: 504 - DNA, 174 bp, Artificial Sequence
  Description of Artificial Sequence: Synthetic polynucleotide
tctcgtttcaggtcaccatcagaaaagctaagtttgctgtatagtgaggatcaggagatctgatcctgattgcagaaccttccctgattacagaatcttgggattgttgagaggattacatgtaaagtaccaggacagtgcatggcacattggttggaataaaaacagggttga

SEQ ID NO: 505 - DNA, 174 bp, Artificial Sequence
  Description of Artificial Sequence: Synthetic polynucleotide
tctgaaactatcttgttgttgatgcaggctattttcttgaccccttcatgggactcccaacaggggtaccccatttactcagcctgccctgctcaacctcttgcaggagggagcacacgagtgaacgagtgcaggaaccagctggctgctttagtgctgtgaggagtaaactcc

SEQ ID NO: 506 - DNA, 174 bp, Artificial Sequence
  Description of Artificial Sequence: Synthetic polynucleotide
tctgaaatgggagtttaagacctacaatcagacaagggcagggagctgtcttgacccccagtggaggctgacaatttttttcctgtgtacactggacccctttcatagaggtgggtgctatgcaagtggagctggtgactgatggctgaccattgatacaggctaggaatacca

SEQ ID NO: 507 - DNA, 174 bp, Artificial Sequence
  Description of Artificial Sequence: Synthetic polynucleotide
tctgccggcgcctgtccggacccgggcccctctccgctttcggccggcctcgggcaccgggcttctggagctcccggagccctgcctgttccctgtccatccaggccagcagctgaaggagcctcacctgcctcccttctctgagtagcacggatttgaggagaagcagcgaag

SEQ ID NO: 508 - DNA, 174 bp, Artificial Sequence
  Description of Artificial Sequence: Synthetic polynucleotide
tctgcgcttccccatggggctggcctgcggcgcctgggcgctctgagattgtcactgctgttccaagggcacacgcagagggatttggaattcctggagagttgcctttgtgagaagctggaaatatttctttcaattccatctcttagttttccataggaacatcaagaaatc

SEQ ID NO: 509 - DNA, 174 bp, Artificial Sequence
  Description of Artificial Sequence: Synthetic polynucleotide
tctggatacttttaggaaaagaaccttgttattatgtactaaagtgaataatttgtgctcttagagtaggagttggaactataggacttgaaggcaagagcaggtatcttatcaaggatctactcactcagtttccctaaagctctctctccagatcggattcaaccgcacatc

SEQ ID NO: 510 - DNA, 174 bp, Artificial Sequence
  Description of Artificial Sequence: Synthetic polynucleotide
tctgggaattccgggcgtttcggctccttggtcgcagaggcaggaggcgtgcgtggcaggagggttcgggttatatactcctaggtcctgggacagaatagttacgacctctgggacaggaactcttctctcttttgttaataaacttccaactccctcctcagacccgaccgc

SEQ ID NO: 511 - DNA, 174 bp, Artificial Sequence
  Description of Artificial Sequence: Synthetic polynucleotide
tcttgaaagcgccacaagcagcagctgctgagccatggctgaaggggaaatcaccaccttcacagccctgaccgagaagtttaatctgcctccagggaattacaagaagcccaaactcctctactgtagcaacgggggccacttcctgaggatccttccggatggcacagtgga

SEQ ID NO: 512 - DNA, 174 bp, Artificial Sequence
  Description of Artificial Sequence: Synthetic polynucleotide
tctttcataggaagaaatcactgagaaaatgagcatcatttctcaaggtttttattttcactgatctacaagtgatgctgctgtaattgtagctgcagtttttaccgatcattcaccactcagcagctggtagagaagtaagcctgcttggcaaccacctgcagggctgcagag

SEQ ID NO: 513 - DNA, 174 bp, Artificial Sequence
  Description of Artificial Sequence: Synthetic polynucleotide
tctttttatggactcttttctgttggcaaaaaaaacctgttatttcttgatcttttggcaccattttcgcacttaataatggcgtaatttctcttctatttgttttctatttgcccatctgttcttttttctccttttcctgccttcttttggaccaaaaacgaaaaccaagaa

SEQ ID NO: 514 - DNA, 174 bp, Artificial Sequence
  Description of Artificial Sequence: Synthetic polynucleotide
tgaactgtggttcccctgcctcccagcccggctgtgagtgctcagcgaccctgacaggctgacaggaccaggagggaggtgccgctcagattctggcaggaccgctggcgggcaggcaggggacagttgggccatatggtgctcttcccagtctggttcctgtacagtctgctc

SEQ ID NO: 515 - DNA, 174 bp, Artificial Sequence
  Description of Artificial Sequence: Synthetic polynucleotide
tgacaggcatgagccaccgcgcctggccccttcttttgaatgggcctccttgcgtttccgtttcaatgccccgtgctacttttttgggagccccaaggctgtactgtttgattgactcctttttttcccctttctttttaacctaaattaaagctgccactgcagagccccgcc

SEQ ID NO: 516 - DNA, 174 bp, Artificial Sequence
  Description of Artificial Sequence: Synthetic polynucleotide
tgactagaatcaggtgcttttgtttctgaagtgcttttattcttactttgacccccaggctggagtgcagtggcacgatcttggttcaccacaatctcgtctcgaaggctcaggtgattctctcacctcagccgcctgagtagctgggaccacagtttcagctgtgagttcaac

SEQ ID NO: 517 - DNA, 174 bp, Artificial Sequence
  Description of Artificial Sequence: Synthetic polynucleotide
tgagattgcccggtacagcagcagttgtattctttattagcttggtagatcattttctctcgctcttttttttaatactagcaactttcatcctttgaaacgtgtgctgaaaaagaagaatcagcaaatactactgaaagtgcaatatttgagtatcactgcgagctgtttgag

SEQ ID NO: 518 - DNA, 174 bp, Artificial Sequence
  Description of Artificial Sequence: Synthetic polynucleotide
tgagcgcctggagttggagacaattcctggttcagaatttaaacatctttctaggtctgcgcggggcggccattggcggcggagtgtcacgtgaccgcgggggcgtgccaatgtgcgccctcacgggtgtcaaacccctgtcagagtgtgcgatcaagatcgtgaaacaacgcg

SEQ ID NO: 519 - DNA, 174 bp, Artificial Sequence
  Description of Artificial Sequence: Synthetic polynucleotide
tgataacatttcctctcaaaccttatcccttactctgcatttgggagatcatacacagagaagccttataaatgtaagagatgtggaaatatcttcagccaaaagtaaatcctcactcatcaagaaatttttactggagagaaaccttgtgaatgtgggaaagcttccattcag

SEQ ID NO: 520 - DNA, 174 bp, Artificial Sequence
  Description of Artificial Sequence: Synthetic polynucleotide
tgataaccacagaatcagaacatataaaaagctctgcgggactggtgctgactgcaaccatgacaaagcttattctcctcacaggtcttgtccttatactgaatttgcagctcggaacagccagctgaaaactctcctggccattggaggctggaacttcgggactgccccgaa

SEQ ID NO: 521 - DNA, 174 bp, Artificial Sequence
  Description of Artificial Sequence: Synthetic polynucleotide
tgattggtataacatctcactttccctctgcattgattttcttcttctcctcctttgcttcataaaaagagggacaagtggctggtgctgtggacagagaagctttatttttagtatgagacaacctctattttctttcaggagagggaagttggattatcaattcttttgtaa

SEQ ID NO: 522 - DNA, 174 bp, Artificial Sequence
  Description of Artificial Sequence: Synthetic polynucleotide
tgcatcccttctgtccctccacccgtccccttccccaccctctggcccccaccttcttggaggcgacaacccccgggaggcattagaagggatttttcccgcaggttgcgaagggaagcaaacttggtggcaacttgcctcccggtgcgggcgtctctcccccaccgtctcaac

SEQ ID NO: 523 - DNA, 174 bp, Artificial Sequence
  Description of Artificial Sequence: Synthetic polynucleotide
tgcgtgggtactggaacaagcaaacgaggcagcgagcgaaggacgggagccggaccctgggccccgtggaactccagcctgcgccaccacgtcacgcacacgctcggcgctgcgatccgcgcatataacgatatttggatttgacctgcattttggaatttatctacacttaaa

SEQ ID NO: 524 - DNA, 174 bp, Artificial Sequence
  Description of Artificial Sequence: Synthetic polynucleotide
tgctaaatctcactgtcactgctaaattcagagcagatagagcctgcgcaatggaataaagtcctcaaaattgaaatgtgacattgctctcaacatctcccatctctctggatttctttttgcttcattattcctgctaaccaattcattttcagactttgtacttcagaagca

SEQ ID NO: 525 - DNA, 174 bp, Artificial Sequence
  Description of Artificial Sequence: Synthetic polynucleotide
tgctacacaccactctggcttacgcttccagctaacagcggtttgtctgtgtttctggactgaagtgactgatgaaaaacagtagtcaagtctggagggtgattccctttcagttcacttgcctttcagttctggggaaattagaagatttgctctctctctctgcttcttaga

SEQ ID NO: 526 - DNA, 174 bp, Artificial Sequence
  Description of Artificial Sequence: Synthetic polynucleotide
tgctcaaaacttcctgtcagtgacgcacttcccctctgctgggcgcgcggtggacggtctgaaagggagtgttcgggtttcgctggggcctcgcggctccagagcccagcatggcttcctcgcgagcctcttccacggcaaccaaaactaaagcacccgacgacttagttgctc

SEQ ID NO: 527 - DNA, 174 bp, Artificial Sequence
  Description of Artificial Sequence: Synthetic polynucleotide
tgctcctctacctgctctactctcaatccgccagaatcatgggctgctgtggctgttctggaggctgtggctctggctgtgggggctgtggctccggcagtgggggctgtggctctggctgtgggggctgtggctccagctgctgtgtgcccatttgctgctgcaagcctgtgt

SEQ ID NO: 528 - DNA, 174 bp, Artificial Sequence
  Description of Artificial Sequence: Synthetic polynucleotide
tgctctggaccccagccccacttgctctagatgctcacccaccgtccccaggaagcagaacagaggggtcggacccctggtccttcctttgagtggaacgtgctggccaaagcgctctatgacaatgtggccgagtccccggatgagctctccttccgcaagggtgacatcatg

SEQ ID NO: 529 - DNA, 174 bp, Artificial Sequence
  Description of Artificial Sequence: Synthetic polynucleotide
tgctgccctgactttttaagaaatctcaatgaactatttgtagagaatcactgatccggcctgcaagcattttgcacggcaaaaatatcgatcagtgttaagtgaagatcacattttatatgcgatcttgacttttttgtcttacattatatttttatagattttgttataaac

SEQ ID NO: 530 - DNA, 174 bp, Artificial Sequence
  Description of Artificial Sequence: Synthetic polynucleotide
tgctggagtcgtgtgttttggctgcgcgtgatcctgcgtgggtcgggaggtgtttctgtgtaggtgtctggccctttcatcagtcgtgcggaggaccgcgtgatttccttccagttctcctcggttttcaggaaaagcctaaagattagactgtaagaaaagaaaatagaagcc

SEQ ID NO: 531 - DNA, 174 bp, Artificial Sequence
  Description of Artificial Sequence: Synthetic polynucleotide
tgctttatagcgtgcaaacctcgccgcgccagggccaagggacaggttggagctgttgatctgttgcgcaattgctattttccccagagcggctttgtctttggatttagcgtttcagaattgcaattccaaaatgtgtaagacgggatattctcttctgtgctgtcaagggac

SEQ ID NO: 532 - DNA, 174 bp, Artificial Sequence
  Description of Artificial Sequence: Synthetic polynucleotide
tggaagatgggaaatggccaaaagaataaaccatttcctcttacttaccgaatgaaaagcttgcttcatcttggcgttcaagactctctaatatgattccacctgttgggctctttcttccatttgcctccgcagatagtgtctgccttctggagagctgaccaaacactaagg

SEQ ID NO: 533 - DNA, 117 bp, Artificial Sequence
  Description of Artificial Sequence: Synthetic polynucleotide
cacttggcttcaaagctggctcttggaaattgagcggagagcgacgcggttgttgtagctgccgctgcggccgccgcggaataataagccgggatctaccatacccattgactaact

SEQ ID NO: 534 - DNA, 174 bp, Artificial Sequence
  Description of Artificial Sequence: Synthetic polynucleotide
tggctgaggaaggaggaggcacccacaggctgctgggaggagagcataaggaatctacttgaaaatggatcggtttatgttggattaaatgctgctctttgtggcctcatagcaaacagtctttttcgacgcatcttgaatgtgacaaaggctcgcatagctgctggcttacca

SEQ ID NO: 535 - DNA, 174 bp, Artificial Sequence
  Description of Artificial Sequence: Synthetic polynucleotide
tgggagcgatctggaaagctgcacttgtgctcccttcctcgtaggtttgctgtggaacgttgtggcttctgtggctcctcaggcccgggggcgccccttgaaccctccactcttggctccaagcaccttccctgggaagctgtatctgctgggttcgcagacaggaacagaaac

SEQ ID NO: 536 - DNA, 174 bp, Artificial Sequence
  Description of Artificial Sequence: Synthetic polynucleotide
tggggtgcccagaacactggccctgggctagcgacttgcctcagccccatttcccggagaggctgccatgaagaggaagccggcggagtcttggtgctgagtctgagggcttcaggcaggacccaagactctcctctgaggtagcagcccccagagaaggttagctgttctctg

SEQ ID NO: 537 - DNA, 174 bp, Artificial Sequence
  Description of Artificial Sequence: Synthetic polynucleotide
tggggtttgtgaagtcgtggcccgttagcaggaagcctaacagtcgccccgacgctagtgagggacccaatctgagtccccggccagccgaatccaagccgtgtgtactgcgtgctcagcactgcccgacagtcctagctaaacttcgccaactccgctgcctttgccgccacc

SEQ ID NO: 538 - DNA, 174 bp, Artificial Sequence
  Description of Artificial Sequence: Synthetic polynucleotide
tggtggcagcaggtgcttagcagcccttgtccagtctcgcctgtgacactgctgctcccttcccctgtcctgacctcctggttggctgtcctgccagagccttgcctggaagatgaaattccagctaccctgtgggagcagtaacgccttcttccttcttctcaatctccagaa

SEQ ID NO: 539 - DNA, 174 bp, Artificial Sequence
  Description of Artificial Sequence: Synthetic polynucleotide
tgtccagtgccaaaaccaagatcaaaaagcaacctcagaccaatacccagagattctcacattaaagagcaaagtcaacagaaaatcagcccagcagccgtaggagaggagtcatccccaggccggccccagtctctgctggacaacgctagcacctcagacagtcaggcagtg

SEQ ID NO: 540 - DNA, 174 bp, Artificial Sequence
  Description of Artificial Sequence: Synthetic polynucleotide
tgtcgtaagattttttcttttcattttctccagggagggtaaatcaatataacctcttctctagagaggaggtggttaggttggtcttaagcagtgttagaagatctattttttttcaaaccaggtgtctgagctgggtgaattccagcctggggagaggactttgatcaccag

SEQ ID NO: 541 - DNA, 174 bp, Artificial Sequence
  Description of Artificial Sequence: Synthetic polynucleotide
tgtgacttcacctcagttttgtgatccgtaaaatggacaaattcgaagctacttcacagtgctgttgagaggattaaatgaaacaatgcttgtaaagctctttgcaggagggagcctcggaagcagggcctggccggcagagcacacctgctgtcaccagggaccacaggcagc

SEQ ID NO: 542 - DNA, 174 bp, Artificial Sequence
  Description of Artificial Sequence: Synthetic polynucleotide
tgtgagaggagcaggttcaggtaaacaaagggcgaggacccgagcgagcttaaggagtggggtgcagcgtctggtcagcggagggtgaattctcaggactggtcgggagtcaaggtgccacatctcctgcctttctgctcactttcctgcctgttttgcctgaccacagccatc

SEQ ID NO: 543 - DNA, 174 bp, Artificial Sequence
  Description of Artificial Sequence: Synthetic polynucleotide
tgtgctgagctggcgcagcggcagcagcatgagccggaccctcgcatcggccgtgcccctgtcgagtcccgactactacgagaggctgggccaactccagcacgggctgcgggacagtgaaaagaagagattggacctggaaaagaaactttatgaatataatcagtctgatac

SEQ ID NO: 544 - DNA, 174 bp, Artificial Sequence
  Description of Artificial Sequence: Synthetic polynucleotide
tgtgctttctctctgtttcagctgttttccttttaagatactcctctcagatttgtgtgcttcttcccttcccacattctatactgcccagcgcctgggattccagatctgcgtttgaatccaggaaagggaggtggacacctgcgcaggtgtgtgccctccggcccctgaagc

SEQ ID NO: 545 - DNA, 174 bp, Artificial Sequence
  Description of Artificial Sequence: Synthetic polynucleotide
tgtgtgtatttcctcccgttctttatcagagcccccaaaataagtaggaatgggcagtggctattcacattcactacaccttttccatttgctaataaggccctgccaggctgggagggaattgtccctgcctgcttctggagaaagaagatattgacaccatctacgggcacc

SEQ ID NO: 546 - DNA, 174 bp, Artificial Sequence
  Description of Artificial Sequence: Synthetic polynucleotide
tgttcgccgttactctgcgcgtaagtcgcttgtccgtggcttctctgagaagaaaagttgaaaaagggtaaaagttttcaggaatattcgggctctctattgctaagcatagcgagtgtcggttttctctctccaacagacatcgctattgcggttccgaggcagtgggaagag

SEQ ID NO: 547 - DNA, 174 bp, Artificial Sequence
  Description of Artificial Sequence: Synthetic polynucleotide
ttcagaatgcagtgtactgttgtggagtcttcccgctatctagttccaaaatttcatcaccccaaatggaaatcctttacccattgacagttactccccattctccccttcctctagcccctggcaaccactaatctgctttctatctatggatttgcctattctggacatttc

SEQ ID NO: 548 - DNA, 174 bp, Artificial Sequence
  Description of Artificial Sequence: Synthetic polynucleotide
ttcatctattgtaggcctagcccctgcctttgaaaacaaggaaaggttggtagaacatcaacacagcatggaatttccagggaggtctcatttcaaaacttcataaagaacaagaaccacctggacttctgtgagggcgatgattaaactggcctgagtttgaatgaaaggata

SEQ ID NO: 549 - DNA, 174 bp, Artificial Sequence
  Description of Artificial Sequence: Synthetic polynucleotide
ttcatggtgactgggacgagtaggtttcactgtttctcataggagacttgacagcttaaagtaaaaacaaattattttcgtcaaagtttttttttttctcttaactgatttttagcaaacctcagactgagacacaggactcaacggtgtattcctggaaggcaaggtgctata

SEQ ID NO: 550 - DNA, 174 bp, Artificial Sequence
  Description of Artificial Sequence: Synthetic polynucleotide
ttccccaagtcacacagtggtatcagagctaagaatgggacccagatatgactgatctagttctgttccaaaaccgtgctgtattatattaacgcctaccctctgaagaggtccaagcaacggaagtactactacgaagctgcctttctggccatccttgagaaaaatagacag

SEQ ID NO: 551 - DNA, 174 bp, Artificial Sequence
  Description of Artificial Sequence: Synthetic polynucleotide
ttcccccgccgccaggctgacttctcatcgcttgtttttctttttgcatttttcctcccaccgccgttgccgccctccccgtcctggccgtccgccctccgccctctgcagggacatctctacaccgttcccatccgggaacagggcaacatctacaagcccaacaacaaggcc

SEQ ID NO: 552 - DNA, 174 bp, Artificial Sequence
  Description of Artificial Sequence: Synthetic polynucleotide
ttccggcgttgttgaccctatttcccgtgctgcaccgcagcccctttctcttccggttctaggcgcttcgggagccgcggcttatggtgcagacatggccaagtccaagaaccacaccacacacaaccagtcccgaaaatggcacagaaatggtatcaagaaaccccgatcaca

SEQ ID NO: 553 - DNA, 174 bp, Artificial Sequence
  Description of Artificial Sequence: Synthetic polynucleotide
ttcctgctcttgaatatctggttgaactacttaagcttaatttgttaaactccggtaagtacctagcccacatgatttgactcagagattctcttttgtccacagacagtcatctcaggagcagaaagaaaagagctcccaaatgctatatctattcaggggctctcaagaaca

SEQ ID NO: 554 - DNA, 174 bp, Artificial Sequence
  Description of Artificial Sequence: Synthetic polynucleotide
ttcctggtccagaactttacacagaaaaggtgctcaaaggatatttgtttaatgaatgtggtatgctgacatttaaacaggacaaaacttgtagaacttcatggaggaacacggagtgacccaaaccgaacatatggctaccatagaagcacatgcagtggcccagcaagtgca

SEQ ID NO: 555 - DNA, 174 bp, Artificial Sequence
  Description of Artificial Sequence: Synthetic polynucleotide
ttctgcgtttctctagtgcagtgcctggagatgaccaccaaacggaaaatcatcggccgtctggtgccatgccgatgtttccgaggtgaagaagaaatcatctcagttttagattactcccactgcagtcttcagcaggtgccaaaggaggtctttaacttcgaacgaacatta

SEQ ID NO: 556 - DNA, 174 bp, Artificial Sequence
  Description of Artificial Sequence: Synthetic polynucleotide
ttctgtaccgcgtctgatgatggagagtcccggggacacctccgcggacacgtgttggactcagggctttaggcccgtgacagctgacagcttcagacacaggaggaagggagggaagggggaggacagaggagacaggcaggtgctgtcctcaaagccctgcgttcttctgag

SEQ ID NO: 557 - DNA, 174 bp, Artificial Sequence
  Description of Artificial Sequence: Synthetic polynucleotide
ttctgtgacctgctcctgggactttgctggctcacggagacacttctctatggagcttcagtagcaaataaggacatcatctgctataacctacaagcagttggacagatattctacatttcctcatttctctacaccgtcaattacatctggtatttgtacacagagctgagg

SEQ ID NO: 558 - DNA, 174 bp, Artificial Sequence
  Description of Artificial Sequence: Synthetic polynucleotide
ttctgttcttggagtctagacagcatcaggagttgggctcagtgaacaaaactttaatgtctagagcatttatgagggttttaatgattggaaaatctatcctgagaatgtggtcaccatatgtgacagccttgctttctatcttgtcttcagtttctggggcttctctgcaga

SEQ ID NO: 559 - DNA, 174 bp, Artificial Sequence
  Description of Artificial Sequence: Synthetic polynucleotide
ttgaagcaaggttgtggagaaaagcaaaggagacaaaaagtaaccttcctgaagaggacatgtgattggaagttgtcaattgttgaagcattggtaactccagtctctaacgttttagaaaatcataacaagcggttctctaccctgtaaaggtgaactactgagttcttcatt

SEQ ID NO: 560 - DNA, 174 bp, Artificial Sequence
  Description of Artificial Sequence: Synthetic polynucleotide
ttgagttttccccaggctgctctattgttgcctgtagctgtgatttttcaggcaggctgctcctctgaggaccacccttaactgtctacctaactggtttttccttttcttctcctcatttgtatttatgtatcagtgtattatgtatttatatacacttggagatacagtaaa

SEQ ID NO: 561 - DNA, 174 bp, Artificial Sequence
  Description of Artificial Sequence: Synthetic polynucleotide
ttgcacaaaaacctggaatcttttaggagtctcctcccagtcgttgaaggtttggggagcagctgatacagcaaggagggctcttgcaaggattcaagctccgagccctggaggagcagcacggagcgggagagcgtggcgagagaatgaagaaaccaatcgcccgggagaagc

SEQ ID NO: 562 - DNA, 174 bp, Artificial Sequence
  Description of Artificial Sequence: Synthetic polynucleotide
ttgcctgattccgcacgagagtgtcaatgaagacctcaaagtctggagaaaaatgacctttcatggaataagaagtatacctccttctacatgtttttgtcttactgacctctgataactggaacacatgactctgggtctgtagaaagtcaactgatcaaactcatcctcacc

SEQ ID NO: 563 - DNA, 174 bp, Artificial Sequence
  Description of Artificial Sequence: Synthetic polynucleotide
ttgcttcaggccatctggatgtatacatgcaggtcacagggaatatgatggcttagcttgggttcagaggcctgacacctcaggctgccaaatgtggaagatttaaatacttgaaccaataccctcctcccaaaaactgaaattggcttctgtttctgagttggtccaggcgca

SEQ ID NO: 564 - DNA, 174 bp, Artificial Sequence
  Description of Artificial Sequence: Synthetic polynucleotide
ttggagagaggggtgatgcctggtgctggtggaacccctgcacagagacggacacaggatgagctctaagtacccgcggtctgtccggcgctgcctgcccctctgggccctaacactggaagcagctctcattctcctcttctatttttttacccactatgacgcttccttaga

SEQ ID NO: 565 - DNA, 174 bp, Artificial Sequence
  Description of Artificial Sequence: Synthetic polynucleotide
ttggggaggtgagaggtgatttcctgccattcttctgtggggcgggcttcccagggtgctcatgccaggctgacgggtccagtgcgggctcccgctgctgggggagagctgggttttcatggggcggcagccgaggcaggacccgcagccatgaaccgcttcaatgggctctgc

SEQ ID NO: 566 - DNA, 174 bp, Artificial Sequence
  Description of Artificial Sequence: Synthetic polynucleotide
ttggggcctgggttcctttgccccttgcccaccagggaggggtgggagacgagagagggtgaactttcccctgcgagattctggtgaaaggggaaatatgcttcgagtcagtaaagctgcgcaagtgcacagtcaaggagagagtcttgggaaaaccaaggatagttcccggag

SEQ ID NO: 567 - DNA, 174 bp, Artificial Sequence
  Description of Artificial Sequence: Synthetic polynucleotide
ttgtcccaagtcgattgatttcccagctatattgtggcctgaagcctccagcgtccacacgaaaccagatttgcctgaaaatggctcggccaagttcaagacctggcgactcccctggcctttgcccacaacccgtcccgggtgtgggagttctaccactaccggcgggaggtc

SEQ ID NO: 568 - DNA, 174 bp, Artificial Sequence
  Description of Artificial Sequence: Synthetic polynucleotide
ttgtttgttgtgttttccctggcaaacagctggagaaagagcagctcatggagaggctgagagaagcggttttcgcgtcctacccaaactgggagagtaaccttcagcagctggactcaccgattggttttccttcattttcagtgaaatcccattctctggctggagacacag

SEQ ID NO: 569 - DNA, 174 bp, Artificial Sequence
  Description of Artificial Sequence: Synthetic polynucleotide
tttagtgtcacaggagacacgagggcaaagtgctgaggaaactctagagcaacatcggaatgcatggtgaagcatcagatggtgaaggagaaggagacacagaagtgatgcagcaggagacagttccagttcctgtaccttcagagaaaaccaaacagcctaaagaatgttttt

SEQ ID NO: 570 - DNA, 174 bp, Artificial Sequence
  Description of Artificial Sequence: Synthetic polynucleotide
tttccgggtgtgtgtttccggcgtcggcggccgcggccggggacggtgtgagagcggtaagatggcggcggcggcggtggtggagttccagagagcccagtctctactcagcaccgaccgggaggcctccatcgacatcctccactccatcgtgaagcgtgacattcaggaaaa

SEQ ID NO: 571 - DNA, 174 bp, Artificial Sequence
  Description of Artificial Sequence: Synthetic polynucleotide
tttcctttcggccggaaccgccatcttccagtaattcgccaaaatgacgaacacaaagggaaagaggagaggcacccgatatatgttctctaggccttttagaaaacatggagttgttcctttggccacatatatgcgaatctataagaaaggtgatattgtagacatcaaggg

SEQ ID NO: 572 - DNA, 174 bp, Artificial Sequence
  Description of Artificial Sequence: Synthetic polynucleotide
tttctagtaccttctcaggatccctcctccgccaacgaattcctcaaccacgggccaagcaaactactcccccgcccactgtcagcagcagtctctgttgaatgggaatactgcaccttcaggcttaacgccacgtgggctcctttgctgtcctccaggcactgttatagaaga

SEQ ID NO: 573 - DNA, 174 bp, Artificial Sequence
  Description of Artificial Sequence: Synthetic polynucleotide
tttgaaagcgtgggctgaatgctgacctcccggacatcatgagtgttgttctacctgcgccccctggacatcctggcggaagtggtcccttctgatggcgccacaagcgggatcaggatagttcaggttcacggtgcacggggactccagctctcagtagccgccccccgcacc

SEQ ID NO: 574 - DNA, 174 bp, Artificial Sequence
  Description of Artificial Sequence: Synthetic polynucleotide
tttgcgggaaagcagcggacttgaaaatactggaaatctgtccggatccaaattattttgcaagccagatgagtaaccagagggcatgaaaggttgagaacatttgacttccctgcaaaccttggtatagatcacttccttttctgtaggaaaggaaaggcaccaaagagcaca

SEQ ID NO: 575 - DNA, 174 bp, Artificial Sequence
  Description of Artificial Sequence: Synthetic polynucleotide
tttgggcattgtccccgggtcttccaacggactgggcgttgctcccggacactgaggactggccccggggtctcgctcaccttcagcagcgtccaccgcctgccacagagcgttcgatcgctcgctgcctgagctcctggtgcgcccgcggacgcagcctccagcttcgcggag

SEQ ID NO: 576 - DNA, 174 bp, Artificial Sequence
  Description of Artificial Sequence: Synthetic polynucleotide
tttggtctgcttctcgaaggttcaattcacagagcacttcatatctaccagggtaatatcaaaatatatgttcctaaaacatccctgagttcaccaccttggccagaagttgttctgccagacccagttgaggagaccagacaccatgcagaggtcgtgaagaaggtgaatgag

SEQ ID NO: 577 - DNA, 174 bp, Artificial Sequence
  Description of Artificial Sequence: Synthetic polynucleotide
ttttcagcctgtgatttgataaccgccgccgggtggcgtggagcgtcccgagacttcttccttcattgcagcccctcttcttttagttctagactgaagttcgaggaacgcaccacttggctgaaattaggatccagatttcccaaacttccttcggaggaaaaagccctaacg

SEQ ID NO: 578 - DNA, 174 bp, Artificial Sequence
  Description of Artificial Sequence: Synthetic polynucleotide
ttttgattgccatttccttgggacagcctgaagagagaatcgaaagaagttcttttcagtatggttgcataacatcgagtcggagattgtgaaatgtcctttgagaaaaatgtacgggcaggaagatgaataggtgtctgtttgattaaggctctccttcggaaagatgtcgga

SEQ ID NO: 579 - DNA, 174 bp, Artificial Sequence
  Description of Artificial Sequence: Synthetic polynucleotide
ttttgccggatgttgttgtatgtccgagagacacgtgaggttctgctacgtcattaccaggcacgcgcaggaaacatggcggcggcgggtgttgtgagcgggaaggtttttggtttcttcttgattcaatcttgataagtagtatgtgtccaggactttatccatactccagtt

SEQ ID NO: 580 - DNA, 174 bp, Artificial Sequence
  Description of Artificial Sequence: Synthetic polynucleotide
ttttttttttttttttttgagaaaggggaatttcatcccaaataaaaggaatgaagtctggctccggaggagggtccccgacctcgctgtgggggctcctgtttctctccgccgcgctctcgctctggccgacgagtggagaaatctgcgggccaggcatcgacatccgcaacg

SEQ ID NO: 581 - DNA, 233 bp, Artificial Sequence
  Description of Artificial Sequence: Synthetic polynucleotide
cagagatccaggggaggcgcctgtgaggcccggacctgccccggggcgaagggtatgtggcgagacagagccctgcacccctaattcccggtggaaaactcctgttgccgtttccctccaccggcctggagtctcccagtcttgtcccggcagtgccgccctccccactaagacctaggcgcaaaggcttggctcatggttgacagctcagagagagaaagatctgagggaag

SEQ ID NO: 582 - DNA, 30 bp, Artificial Sequence
  Description of Artificial Sequence: Synthetic oligonucleotide
gttgtcagtccgatctcgcgagagaggacg

SEQ ID NO: 583 - DNA, 117 bp, Artificial Sequence
  Description of Artificial Sequence: Synthetic polynucleotide
atggaggagccgcagtcagatcctagcgtcgagccccctctgagtcaggaaacattttcagacctatggaaactacttcctgaaaacaacgttctgtcccccttgccgtcccaagca

SEQ ID NO: 584 - DNA, 180 bp, Artificial Sequence
  Description of Artificial Sequence: Synthetic polynucleotide
cagaaagtgccacgactccacacgcgcgcacgcagccagcgagcggccggagcggacggcagacggggcgggcggcgtcagggtcgcagcgtctacagctgctcgggggcggtttcttggcggaggcttggccggctcctctctcccggctccgcggcggctgcgaaggcggcggctcct

SEQ ID NO: 585 - DNA, 237 bp, Artificial Sequence
  Description of Artificial Sequence: Synthetic polynucleotide
agtctatgaggagggacctacaaagactggaaactattcttagctccgtcactgactccaagttcatcccctctgtctttcagtttggttgagatataggctactcttcccaactcagtcttgaagagtatcaccaactgcctcatgtgtggtgaccttcactgtcgtatgccagtgactcatctggagtaatctcaacaacgagttaccaatacttgctcttgattgataaacaga

SEQ ID NO: 586 - DNA, 94 bp, Artificial Sequence
  Description of Artificial Sequence: Synthetic oligonucleotide
acttgtttcctttcatttcctttttttcttttcttttcttttttttttttttttttttttttgagaaaggggaatttcatcccaaataaaagga

SEQ ID NO: 587 - DNA, 100 bp, Artificial Sequence
  Description of Artificial Sequence: Synthetic polynucleotide
ggcccccgccttccgcgccccccacgggaaggaagcacccccggtattaaaacgaacggggcggaaagaagccctcagtcgccggccgggaggcgagccg

SEQ ID NO: 588 - DNA, 180 bp, Artificial Sequence
  Description of Artificial Sequence: Synthetic polynucleotide
ggcgcctccctctgttcctcccaaggctaaactttctaattcccttctttgggctcgggggctcccggagcagggcgagagctcgcgtcgccggaaaggaagacgggaagaaagggcaggcggctcggcgggcgtcttctccactcctctgccgcgtccccgtggctgcagggagccggc

SEQ ID NO: 589 - DNA, 71 bp, Artificial Sequence
  Description of Artificial Sequence: Synthetic oligonucleotide
ccacctgttgcaacttcttttttacagatggagtcatcagaacccactgtgaggaagtgacttctccttga

SEQ ID NO: 590 - DNA, 228 bp, Artificial Sequence
  Description of Artificial Sequence: Synthetic polynucleotide
tgcggcgccattttaagcctctcggtctgtggcagcagcgttggcccggccccgggagcggagagcgaggggaggcggagacggaggaaggtctgaggagcagcttcagtccccgccgagccgccaccgcaggtcgaggacggtcggactcccgcggcgggaggagcctgttcccctgagggtatttgaagtataccatacaactgttttgaaaatccagcgtggaca

SEQ ID NO: 591 - DNA, 150 bp, Artificial Sequence
  Description of Artificial Sequence: Synthetic polynucleotide
tgatttctttttgtggtaaaaatcttagttcatgtgaagaaatttcatgtgaatgttttagctatcaaacagtactgtcacctactcatgcacaaaactgcctcccaaagacttttcccaggtccctcgtatcaaaacattaagagtata

SEQ ID NO: 592 - DNA, 166 bp, Artificial Sequence
  Description of Artificial Sequence: Synthetic polynucleotide
cacacggactacaggggagttttgttgaagttgcaaagtcctggagcctccagagggctgtcggcgcagtagcagcgagcagcagagtccgcacgctccggcgaggggcagaagagcgcgagggagcgcggggcagcagaagcgagagccgagcgcggacccagcc

SEQ ID NO: 593 - DNA, 472 bp, Artificial Sequence
  Description of Artificial Sequence: Synthetic polynucleotide
cttcttcgtcagcctcccttccaccgccatattgggccactaaaaaaagggggctcgtcttttcggggtgtttttctccccctcccctgtccccgcttgctcacggctctgcgactccgacgccggcaaggtttggagagcggctgggttcgcgggacccgcgggcttgcacccgcccagactcggacgggctttgccaccctctccgcttgcctggtcccctctcctctccgccctcccgctcgccagtccatttgatcagcggagactcggcggccgggccggggcttccccgcagcccctgcgcgctcctagagctcgggccgtggctcgtcggggtctgtgtcttttggctccgagggcagtcgctgggcttccgagaggggttcgggctgcgtaggggcgctttgttttgttcggttttgtttttttgagagtgcgagagaggcggtcgtgcagacccgggagaaag

SEQ ID NO: 594 - DNA, 1578 bp, Artificial Sequence
  Description of Artificial Sequence: Synthetic polynucleotide
catagagccagcgggcgcgggcgggacgggcgccccgcggccggacccagccagggcaccacgctgcccggccctgcgccgccaggcacttctttccggggctcctagggacgccagaaggaagtcaacctctgctgcttctccttggcctgcgttggaccttcctttttttgttgtttttttttgtttttcccctttcttccttttgaattaactggcttcttggctggatgttttcaacttctttcctggctgcgaacttttccccaattgttttccttttacaacagggggagaaagtgctctgtggtccgaggcgagccgtgaagttgcgtgtgcgtggcagtgtgcgtggcaggatgtgcgtgcgtgtgtaacccgagccgcccgatctgtttcgatctgcgccgcggagccctccctcaaggcccgctccacctgctgcggttacgcggcgctcgtgggtgttcgtgcctcggagcagctaaccggcgggtgctgggcgacggtggaggagtatcgtctcgctgctgcccgagtcagggctgagtcacccagctgatgtagacagtggctgccttccgaagagtgcgtgtttgcatgtgtgtgactctgcggctgctcaactcccaacaaaccagaggaccagccacaaacttaaccaacatccccaaacccgagttcacagatgtgggagagctgtagaaccctgagtgtcatcgactgggccttcttatgattgttgttttaagattagctgaagatctctgaaacgctgaattttctgcactgagcgttttgacagaattcattgagagaacagagaacatgacaagtacttctagctcagcactgctccaactactgaagctgattttcaaggctacttaaaaaaatctgcagcgtacattaatggatttctgttgtgtttaaattctccacagattgtattgtaaatattttatgaagtagagcatatgtatatatttatatatacgtgcacatacattagtagcactacctttggaagtctcagctcttgcttttcgggactgaagccagttttgcatgataaaagtggccttgttacgggagataattgtgttctgttgggactttagacaaaactcacctgcaaaaaactgacaggcattaactactggaacttccaaataatgtgtttgctgatcgttttactcttcgcataaatattttaggaagtgtatgagaattttgccttcaggaacttttctaacagccaaagacagaacttaacctctgcaagcaagattcgtggaagatagtctccactttttaatgcactaagcaatcggttgctaggagcccatcctgggtcagaggccgatccgcagaaccagaacgttttcccctcctggactgttagtaacttagtctccctcctcccctaaccacccccgcccccccccaccccccgcagtaataaaggcccctgaacgtgtatgttggtctcccgggagctgcttgctgaagatccgcgcccctgtcgccgtctggtaggagctgtttgcagggtcctaactcaatcggcttgttgtg

SEQ ID NO: 595 - DNA, 348 bp, Artificial Sequence
  Description of Artificial Sequence: Synthetic polynucleotide
ttaagtacaaggtaaatatattttattcttaatattttaaggaatttgatttagacatttttcctttctagggacagtttggataattttccgtgaaactggatgatctttgaatattaaatgaaaggagactagaataacagtctcttgactattcatgaaggagctttagcagaagcattctttcttggtgtgcaaatcacgcctggcagcccctgcccacagtacccgaagatggcaggccttgttcccttcacctaaattcataaacctgggtgtagtggcttctgatgctgatttgtttctcttttcagtaagtgtggacctttgtgtaccagagagaacatc

SEQ ID NO: 596 - DNA, 40 bp, Artificial Sequence
  Description of Artificial Sequence: Synthetic oligonucleotide
attccagcgcctgacagccaggaccccaggcagcagcgag

SEQ ID NO: 597 - DNA, 132 bp, Artificial Sequence
  Description of Artificial Sequence: Synthetic polynucleotide
atgaagaagaaaacccggcgccgctcgacccggagcgaggagttgacccggagcgaggagttgaccctgagtgaggaagcgacctggagtgaagaggcgacccagagtgaggaggcgacccagggcgaagag

SEQ ID NO: 598 - DNA, 94 bp, Artificial Sequence
  Description of Artificial Sequence: Synthetic oligonucleotide
cgggcccctgccgcctgcaagtcggaaattgcgctgtgctcctgtgctacggcctgtggctggactgcctgctgctgcccaactggctggcaag

SEQ ID NO: 599 - DNA, 367 bp, Artificial Sequence
  Description of Artificial Sequence: Synthetic polynucleotide
aattccagcgagaggcagagggagcgagcgggcggccggctagggtggaagagccgggcgagcagagctgcgctgcgggcgtcctgggaagggagatccggagcgaatagggggcttcgcctctggcccagccctcccgctgatcccccagccagcggtccgcaacccttgccgcatccacgaaactttgcccatagcagcgggcgggcactttgcactggaacttacaacacccgagcaaggacgcgactctcccgacgcggggaggctattctgcccatttggggacacttccccgccgctgccaggacccgcttctctgaaaggctctccttgcagctgcttagacgctggatttttttcgggt

SEQ ID NO: 600 - DNA, 315 bp, Artificial Sequence
  Description of Artificial Sequence: Synthetic polynucleotide
acacggtttttaagaaagaacttctaaccccactccaccgcccaacggtcacgtgacgcgcctgcgtcctcgcctcaaggttttttctggtcgcatattggctgttaactcggctacggggtgtagcgaggtgcattccggaagtaggtcctttgacttttgcttcctctacggaggcaagtaacaacccggcggtcgacgcttagcggaagttcgtcaagtcgcagttgcccccgcacagcggatgtgggtcgcctcttaggtgacgctgggaagtgcctgcagccttcgccgctgccttctggttgaagcact

SEQ ID NO: 601 - DNA, 101 bp, Artificial Sequence
  Description of Artificial Sequence: Synthetic polynucleotide
ggcagggtggagaggtgggctcttcctgcttcccactcatcttatagctttctttccccagatccgaattcgagatccaaaccaaggaggaaaggatatca

SEQ ID NO: 602 - DNA, 119 bp, Artificial Sequence
  Description of Artificial Sequence: Synthetic polynucleotide
ccttctgatggtgaatgggaactcccttcctcctgcagcagcctgcctgcagctgtcctggtagaacagtgtggacattgcagaagctgtcactgccccagaaagaaagcaccccagag

SEQ ID NO: 603 - DNA, 229 bp, Artificial Sequence
  Description of Artificial Sequence: Synthetic polynucleotide
acttccggtggagggccgcctctgagcgggcggcgggccgacggcgagcgcgggcggcggcggtgacggaggcgccgctgccagggggcgtgcggcagcgcggcggcggcggcggcggcggcggcggcggaggcggcggcggcggcggcggcggcggcggctgggcctcgagcgcccgcagcccacctctcgggggcgggctcccggcgctagcagggctgaagagaag

SEQ ID NO: 604 - DNA, 918 bp, Artificial Sequence
  Description of Artificial Sequence: Synthetic polynucleotide
ggactctgagggctttttggagctcgctatgcttaacctggagatgattaaggccccgcttcctggcctcccagcctctaatgccaaaagataagggagaggctggcgtgtgaccccgttttgagtcaggtggacagagggctggccaccttcggaaccatgggtgcaatacggagtcagacctcaatacaagcccactctttcacatatttgaacttttttcacatatcaactttttttgttcactgtgcagggattgttcattgctgctggaggaagatcatggactgtcgcgggaaactgaagtggttgagtatccactagtcgtggatgagggcagtgacttcgcagttttttgcgaattacacatctctttgattatgttgtgactagttttgttagatagtcatttagtgtttgggatacctgttaagccctttgtccagggactgtggttggatttatgaattatttggacggttgtccacttgaaagaactgacagtagcttcataacaatgttacaaatctcgttctaagattaagctgttgaacctatatttgccattagcgcttaatttttgaagtattatttttatgaatcaagccctggaaaaggacaagatatttgaatgaaatagcacccataatggagaacttcacagttgctactcctgtgataggtttatcttagtttcattgtggtataaatggaatagcaggtgttgtcaggtacaaggtttgtagcttgccaatatgttcattaccaacactgcagattcccattgagttggtgggggttttgttacctttgttttttttctcagcaaaataattctataactttttgtttgtgacaagaaatggactttcagtttacttaagattaatacttcttgaatgataaaatcattttgcc

SEQ ID NO: 605 - DNA, 216 bp, Artificial Sequence
  Description of Artificial Sequence: Synthetic polynucleotide
ataacggctagcctgaggagctgctgcgacagtccactacctttttcgagagtgactcccgttgtcccaaggcttcccagagcgaacctgtgcggctgcaggcaccggcgcgtcgagtttccggcgtccggaaggaccgagctcttctcgcggatccagtgttccgtttccagcccccaatctcagagcggagccgacagagagcagggaaccggc

SEQ ID NO: 606 - DNA, 133 bp, Artificial Sequence
  Description of Artificial Sequence: Synthetic polynucleotide
acaaggcagcctcgctcgagcgcaggccaatcggctttctagctagagggtttaactcctatttaaaaagaagaacctttgaattctaacggctgagctcttggaagacttgggtccttgggtcgcaggcatc

SEQ ID NO: 607 - DNA, 217 bp, Artificial Sequence
  Description of Artificial Sequence: Synthetic polynucleotide
aatgcgcctgcagctcgcgctcccgcgccgatcccgagagcgtccgggccgccgtgcgcgagcgagggagggcgcgcgcgcggggggggcgcgcttgtgagtgcgggccgcgctctcggcggcgcgcatgtgcgtgtgtgctggctgccgggctgccccgagccggcggggagccggtccgctccaggtggcgggcggctggagcgagggagcggac

SEQ ID NO: 608 - DNA, 1177 bp, Artificial Sequence
  Description of Artificial Sequence: Synthetic polynucleotide
gcgcgggaggaggagaagcagtggggaggcgcagccgctcacctgcggggcagggcgcggaggagggacccgggctgcgcgctctcgggccgaggaaccaggacgcgcccggagcctcgcacgcggccaagctcggggcgtcccctcccctcggccgggcgaactcaaggggcgcagctctttgctttgacagagctggccggcggaggcgtgcagagcggcgagccggcgagccaggctgagaaactcgagccgggaacaaagaggggtcggactgagtgtgtgtgtcggctcgagctccgggcagaggcatttgggcccgaggcccccgctgtgactccccgagactccgcagtgccctccactgcggagtccccgcgcttgccggcaaaaactttattcttggcaaacttctctttctcttcccctcctcctcggcccccatcttctgctcctcctccttctctagcagattaaatgagcctcgagaagaaaaaccgaagcgaaagggaagaaaataagaagatctaaaacggacatctccagcgtgggtggctcctttttctttttctttttttcccacccttcaggaagtggacgtttcgttatcttctgatccttgcaccttcttttggggcaaacggggcccttctgcccagatcccctctcttttctcggaaaacaaactactaagtcggcatccggggtaactacagtggagagggtttccgcggagacgcgccgccggaccctcctctgcactttggggaggcgtgctccctccagaaccggcgttctccgcgcgcaaatcccggcgacgcggggtcgcggggtggccgccggggcagcctcgtctagcgcgcgccgcgcagacgcccccggagtcgccagctaccgcagccctcgccgcccagtgcccttcggcctcgggggcgggcgcctgcgtcggtctccgcgaagcgggaaagcgcggcggccgccgggattcgggcgccgcggcagctgctccggctgccggccggcggccccgcgctcgcccgccccgcttccgcccgctgtcctgctgcacgaacccttccaactctcctttcctcccccacccttgagttacccctctgtctttcctgctgttgcgcgggtgctcccacagcggagcggagattacagagccgccggg

SEQ ID NO: 609 - DNA, 125 bp, Artificial Sequence
  Description of Artificial Sequence: Synthetic polynucleotide
ttctccccgtgctcccccgttcttccctgcggagtgcgctgcgccgcccagccctgtcgccccccggaggtgatccctccctcctgcctgcccgccagcctgacctgtgcccggctcgcgggccg

SEQ ID NO: 610 - DNA, 199 bp, Artificial Sequence
  Description of Artificial Sequence: Synthetic polynucleotide
gcaatccggagtgtcagctctccatctgtctctgcctggcaggcgcacgcgcccagcaccctgcctccggcgatgccgccccagcccctctgatggccctcctctctgctgccactcattccagaacaggaggcatgagcccggaacgcgcttgcttttaggagacagccactttctgtgtggtacgctggattcaagg

SEQ ID NO: 611 - DNA, 150 bp, Artificial Sequence
  Description of Artificial Sequence: Synthetic polynucleotide
atatcaacctgtttcctcctcctccttctcctcctcctccgtgacctcctcctcctctttctcctgagaaacttcgccccagcggtgcggagcgccgctgcgcagccggggagggacgcaggcaggcggcgggcagcgggaggcggcagc

SEQ ID NO: 612 - DNA, 653 bp, Artificial Sequence
  Description of Artificial Sequence: Synthetic polynucleotide
cagaataatgacatggttccttccatcctccaaaggtgaccaataatagtttgtaagtatcattatgaactaatgaattttcaacatatttgatatatttcaatccattgccatcattgttcttatcgatatttgagttggctcactttgccagtaagagtctattcaaattggcttctgagtccatttgacacaacacctttgatctttgacagtttccttggttttaggtgctagatgatttctcaggctcaccttagacatttcctgccacagacttagaatcagccatttctctaaggaccctgattccatttcatgagaaatgatagagaccacaatcaaaacaagtcatgaatttatactgatattttcaattcaaattaaagatgaggtttttgctaaatttttttgagtttatatttgtatgtcttatgctgaaaaatcttgtttcctaattagtaacataattattcatttgatgggtaaatattttagggccgattctttggttttatagccaagataccctgttgataaagtcttgtgggagcaattataagactggcttattttgaagctttttaaaaaagacatccttacctgttttaactgtagattatattaacttaaataggtacagcccacgcttg

SEQ ID NO: 613 - DNA, 396 bp, Artificial Sequence
  Description of Artificial Sequence: Synthetic polynucleotide
ctcgagctgccgttgcaaagccaactttggaaaaagttttttgggggagacttgggccttgaggtgcccagctccgcgctttccgattttgggggcctttccagaaaatgttgcaaaaaagctaagccggcgggcagaggaaaacgcctgtagccggcgagtgaagacgaaccatcgactgccgtgttccttttcctcttggaggttggagtcccctgggcgcccccacacggctagacgcctcggctggttcgcgacgcagccccccggccgtggatgctcactcgggctcgggatccgcccaggtagcggcctcggacccaggtcctgcgcccaggtcctcccctgccccccagcgacggagccggggccgggggcggcggcgcccgggggcca

SEQ ID NO: 614 - DNA, 391 bp, Artificial Sequence
  Description of Artificial Sequence: Synthetic polynucleotide
catcaccgaacgatgagagaggactacagcgacaaagtgaaagccagccactggagtcgcagcccgcctcggccgccgcgggagcggttcgagttgggagacggccggaagccagtaaaagaagagaaaatggaagaaagggacctgctgtccgacttacaggacatcagcgacagcgagaggaagaccagctcggccgagtcctcgtcagcggaatcaggctcaggttctgaggaagaagaggaggaggaggaagaggaggaggaggaagggagcaccagtgaagaatcagaggaggaggaggaggaagaggaagaggaggaggaggagaccggcagcaactctgaggaggcatcagagcagtctgccgaagaagtaagtgaggaagaaa

SEQ ID NO: 615 - DNA, 147 bp, Artificial Sequence
  Description of Artificial Sequence: Synthetic polynucleotide
acaaggcagcctcgctcgagcgcaggccaatcggctttctagctagagggtttaactcctatttaaaaagaagaacctttgaattctaacggctgagctcttggaagacttgggtccttgggtcgcaggtgggagccgacgggcatc

SEQ ID NO: 616 - DNA, 31 bp, Artificial Sequence
  Description of Artificial Sequence: Synthetic oligonucleotide
cttctgccttttaaaatccagtcccaggaca

SEQ ID NO: 617 - DNA, 294 bp, Artificial Sequence
  Description of Artificial Sequence: Synthetic polynucleotide
gctagctcgggccgggaggagccgcagccggaggagggggaggaggaagaagagaaggaagaggagagggggccgcagtggcgactcggcgctcggaagccgggctcatggacgggtgaggcggcggtgtgcgcagacagtgctccagccgcgcgcgctccccaggccctggcccgggcctcgggccggggaggaagagtagctcgccgaggcgccgaggagagcgggccgccccacagcccgagccggagagggagcgcgagccgcgccggccccggtcgggcctccgaaacc

SEQ ID NO: 618 - DNA, 156 bp, Artificial Sequence
  Description of Artificial Sequence: Synthetic polynucleotide
ctcgccgctgccggggacgggagccgcgcgccaggccgggcggcgggtggcgggctgcgcgccggggttcatgagcctccgggcggcccgcggccccgggagcctgcgccgtgactcaccccccgcccccgcttgtgtctcgtccctcccggcagg

SEQ ID NO: 619 - DNA, 149 bp, Artificial Sequence
  Description of Artificial Sequence: Synthetic polynucleotide
atgggaacgtagaactcgtcatgacacttgtggtaaaataacattattcgcttgcaaaaaacgatgtactttgacaatttaagacacaaaaaaacacaacctcgacaatttaggagttagagaggtcgtgttttgagattagtgagact

SEQ ID NO: 620 - DNA, 485 bp, Artificial Sequence
  Description of Artificial Sequence: Synthetic polynucleotide
acttttggtgggcatttaaaaatgtgtgtgtatgtgtatatatgtatgtgtatgtatgtgtatatatgtatatgtatgtatgtatcgcgtgtatgtgtgtatgtatgcatgtgtatgtatgtatatgcatgtatgtgtatgtgtatatatgtatgtgtgtgtatgtatatgtatgtgtgtgtatgtatatgtgtgtgtatgtgtatgtgtgtgtgtatgtgtgtgtgtatgtatgtatgtatgtatatgtattatacacatatacacatattggtttttttaatcatttgagagttagttgaagataaaaacccatcacccctaaatgtattccaaagaataagaacattgttttatacatagcacacttaacaaaatcaagaaatttaacattaatacagtactgttacctaatccgtagtcgattttcaaattttgtcagttgttccaataatgtcctttatatattccccgcccagctcgag

SEQ ID NO: 621 - DNA, 1137 bp, Artificial Sequence
  Description of Artificial Sequence: Synthetic polynucleotide
aaaaaataaaaccctcccccaccacctccttctccccacccctcgccgcaccacacacagcgcgggcttctagcgctcggcaccggcgggccaggcgcgtcctgccttcatttatccagcagcttttcggaaaatgcatttgctgttcggagtttaatcagaagacgattcctgcctccgtccccggctccttcatcgtcccatctcccctgtctctctcctggggaggcgtgaagcggtcccgtggatagagattcatgcctgtgtccgcgcgtgtgtgcgcgcgtataaattgccgagaaggggaaaacatcacaggacttctgcgaataccggactgaaaattgtaattcatctgccgccgccgctgccaaaaaaaaactcgagctcttgagatctccggttgggattcctgcggattgacatttctgtgaagcagaagtctgggaatcgatctggaaatcctcctaatttttactccctctccccccgactcctgattcattgggaactttcaaatcagctataactggagagtgctgaagattgatgggatcgttgccttatgcatttgttttggttttacaaaaaggaaacttgacagaggatcatgctgtacttaaaaaatacaagtaagtctcgcacaggaaattggtttaatgtaactttcaatggaaacctttgagattttttacttaaagtgcattcgagtaaatttaatttccaggcagcttaatacattgtttttagccgtgttacttgtagtgtgtatgccctgctttcactcagtgtgtacagggaaacgcacctgattttttacttattagtttgttttttctttaacctttcagcatcacagaggaagtagactgatattaacaatacttactaataataacgtgcctcatgaaataaagatccgaaaggaattggaataaaaatttcctgcgtctcatgccaagagggaaacaccagaatcaagtgttccgcgtgattgaagacaccccctcgtccaagaatgcaaagcacatccaataaaatagctggattataactcctcttctttctctgggggccgtggggtgggagctggggcgagaggtgccgttggcccccgttgcttttcctctgggaagg

SEQ ID NO: 622 - DNA, 170 bp, Artificial Sequence
  Description of Artificial Sequence: Synthetic polynucleotide
tatttagaattagaatgtttcttagcggtcgtgtagttatttttatgtcataagtggataatttgttagctcctataacaaaagtctgttgcttgtgtttcacattttggatttcctaatataatgttctctttttagaaaaggtggacaagtcctattttcaagagaag

SEQ ID NO: 623 - DNA, 62 bp, Artificial Sequence
  Description of Artificial Sequence: Synthetic oligonucleotide
aaacctttgcatcttctgatagtctagccaaggtccaagaagtagcaagctggcttttggaa

SEQ ID NO: 624 - DNA, 127 bp, Artificial Sequence
  Description of Artificial Sequence: Synthetic polynucleotide
ctcttggtggagcccatattgaaccctgcccatgagcttcaggccatagggagggtgcaccgaattggacagacaaaacctactattgtacacagattcttaattaaagcaacaatagaagaaagaa

SEQ ID NO: 625 - DNA, 211 bp, Artificial Sequence
  Description of Artificial Sequence: Synthetic polynucleotide
gcgctcaatcctttgggaactaaaccggagccagaggaaggggagaatgagtgtcgcctgctaaagaaagtcaagtctgaaaagcaatgatgttgtccactgggcatgtactgaccaatgtggcaggtctgagaacatagctgaagctgaaaataggaaagctgggggcaaggaagagccttgaatcttgaggtgggacgttgactctaag

SEQ ID NO: 626 - DNA, 90 bp, Artificial Sequence
  Description of Artificial Sequence: Synthetic oligonucleotide
aaagacttaaacataagacctaaaaccataaaaaccacagaagaaaacataggcaatgccattcaggacataggcatgggcaaagacttc

SEQ ID NO: 627 - DNA, 75 bp, Artificial Sequence
  Description of Artificial Sequence: Synthetic oligonucleotide
accaacataagacaaagaaacatccagcagctgcctatggcaaaagattacaatgtgtcaaacaagagggcaatg

SEQ ID NO: 628 - DNA, 72 bp, Artificial Sequence
  Description of Artificial Sequence: Synthetic oligonucleotide
gaaatcatcatcaaacggaatcgaatggaatcattgaatggaatggaatggaatcatcatggaatggaaacg

SEQ ID NO: 629 - DNA, 78 bp, Artificial Sequence
  Description of Artificial Sequence: Synthetic oligonucleotide
aaaaggaaatacaagacaacaaacacagaaacacaaccatcgggcatcatgaaacctcgtgaagataatcatcagggt

SEQ ID NO: 630 - DNA, 75 bp, Artificial Sequence
  Description of Artificial Sequence: Synthetic oligonucleotide
gcactagtcagatcaagacagaaagtcaacgaacaaagaacagacttaaactacactctagaacaaatggaccta

SEQ ID NO: 631 - DNA, 96 bp, Artificial Sequence
  Description of Artificial Sequence: Synthetic oligonucleotide
aaaatcaatatgaaaacaaacacaagcagacaaagaaaattgggcaaaaggtttgagcagacacttcaccaaagaagtacaaatggcaaatcagca

SEQ ID NO: 632 - DNA, 54 bp, Artificial Sequence
  Description of Artificial Sequence: Synthetic oligonucleotide
agaaaacacacagacaacaaaaaacacagaacgacaatgacaaaatggccaagc

SEQ ID NO: 633 - DNA, 72 bp, Artificial Sequence
  Description of Artificial Sequence: Synthetic oligonucleotide
agcagccaacaagcatatgaaataatgctccacaacactcatcatcagagaaatgcaaatcaaaaccaaaat

SEQ ID NO: 634 - DNA, 90 bp, Artificial Sequence
  Description of Artificial Sequence: Synthetic oligonucleotide
agaaagaatcaagaggaaatgcaagaaatccaaaacactgtaacagatatgatgaataatgaggtatgcactcatcagcagactcgacat

SEQ ID NO: 635 - DNA, 87 bp, Artificial Sequence
  Description of Artificial Sequence: Synthetic oligonucleotide
agacagtcagacaatcacaaagaaacaagaatgaaaatgaatgaacaaaaccttcaagaaatatgggattatgaagaggccaaatgt

SEQ ID NO: 636 - DNA, 75 bp, Artificial Sequence
  Description of Artificial Sequence: Synthetic oligonucleotide
aacataatccatcaaataaacagaaccaaagacaaaaaccacatgattatctcaatagatgcagaaaaggccttc

SEQ ID NO: 637 - DNA, 80 bp, Artificial Sequence
  Description of Artificial Sequence: Synthetic oligonucleotide
gaatggaattgaaaggaatggaatgcaatggaatggaatgggatggaatggaatgcaatggaatcaactcgattgcaatg

SEQ ID NO: 638 - DNA, 249 bp, Artificial Sequence
  Description of Artificial Sequence: Synthetic polynucleotide
gaagccctcaggagccctggggtgggtctccttgccctgtgaacgctccatttgtgttattgaatccaacataaatgcagcattgtcttcagaggtgagcaatggccgtggccggaggtgcgcatgggatgcaggcggcgtgtgctgctgttgattttctctgctctgctcttagcttactttagcagatagtggagtttcacgtggcagtccggtaaaccaaggcagtgtgaacatcccttccccaca

SEQ ID NO: 639 - DNA, 223 bp, Artificial Sequence
  Description of Artificial Sequence: Synthetic polynucleotide
ttcagaagagaattccccggcagcagcgtggcgctcagcatgttccgtgtctgactgttttgattgtctctcagtccagttgacaaattccttttaagatgaaatttgaattaatttgcagaacttgtacaaatctccaagaaaacagcttaaggaacagattaaagaatgaatgccttaggaattaaagcattaatagctcttgagtagactggatggaaag

SEQ ID NO: 640 - DNA, 128 bp, Artificial Sequence
  Description of Artificial Sequence: Synthetic polynucleotide
agagccgccctgtccgcgccgcgcctcggcagccggaacagggccgccgtcggggagccccaacacacggtccacagctcatcatgatggacttggagctgccgccgccgggactcccgtcccagcag

SEQ ID NO: 641 - DNA, 277 bp, Artificial Sequence
  Description of Artificial Sequence: Synthetic polynucleotide
ggccatgcagcgacggccgccgcggagctccgagcagcggtagcgcccccctgtaaagcggttcgctatgccggggccactgtgaaccctgccgcctgccggaacactcttcgctccggaccagctcagcctctgataagctggactcggcacgcccgcaacaagcaccgaggagttaagagagccgcaagcgcagggaaggcctccccgcacgggtgggggaaagcggccggtgcagcgcggggacaggcactcgggctggcactggctgctaggg

SEQ ID NO: 642 - DNA, 398 bp, Artificial Sequence
  Description of Artificial Sequence: Synthetic polynucleotide
gacaggaggaaacgcagcgccagcagcatctcatctaccctccttgacacctccccgtggctccagccagaccctagaggtcagccttgcggaccaacaggaggactcccagctttcccttttcaagaggtccccagacaccggccaccctcttccagcccctgcggccagtgcaaggaggcaccaatgctctgaggctgtcgcgtggtgcagcgtcgagcatcctcgccgaggtcctttctgctgcctgtcccgcctcaccccgctccatcacaccagctggccctctttgcttccttttcccagaatcgttaagccccgactcccactagcacctcgtaccaacctcgccccaccccatcctcctgccttcccgcgctccggtgtcccccgctgcc

SEQ ID NO: 643 - DNA, 28 bp, Artificial Sequence
  Description of Artificial Sequence: Synthetic oligonucleotide
tgaaaatttttccttacaaacagatatg

SEQ ID NO: 644 - DNA, 393 bp, Artificial Sequence
  Description of Artificial Sequence: Synthetic polynucleotide
gaccggtcagcggactcaccggccagggcgctcggtgctggaatttgatattcattgatccgggttttatccctcttcttttttcttaaacatttttttttaaaactgtattgtttctcgttttaatttatttttgcttgccattccccacttgaatcgggccgacggcttggggagattgctctacttccccaaatcactgtggattttggaaaccagcagaaagaggaaagaggtagcaagagctccagagagaagtcgaggaagagagagacggggtcagagagagcgcgcgggcgtgcgagcagcgaaagcgacaggggcaaagtgagtgacctgcttttgggggtgaccgccggagcgcggcgtgagccctcccccttgggatcccgc

SEQ ID NO: 645 - DNA, 165 bp, Artificial Sequence
  Description of Artificial Sequence: Synthetic polynucleotide
cgcggtgcccgcggttgcaacgggatcccgggcgctgcagcttgggaggcggctctccccaggcggcgtccgcggagacacccatccgtgaaccccaggtcccgggccgccggctcgccgcgcaccaggggccggcggacagaagagcggccgagcggctcgagg

SEQ ID NO: 646 - DNA, 665 bp, Artificial Sequence
  Description of Artificial Sequence: Synthetic polynucleotide
ggtgctggaggaggaaaccggcggagcagcttccccactctcagttgcgcttctggcgatggcgatcagaggtcctgctgcgctctccgccgcgctctacctccattagccgcgctgcgcggtgctgcgccctcgccggtgcctctctcctgggtcccaggatcggcccccaccatccaggcacgacccccttccccggcccctcggcctttcccccaactcggccatctccgacccggggcgcgtgttccccccggcccggcgccttctctccctccgggggcacccgctccctagccccggcccggccctccccgcggcgcagcacggagtctcggcgtcccatggcgcaacctacggcctcggcccagaagctggtgcggccgatccgcgccgtgtgccgcatcctgcagatcccggagtccgacccctccaacctgcggccctagagcgcccccgccgccccgggggaaggagagcgcgagcgcgctgagcagacagagcgggagaacgcgtcctcgcccgccggccgggaggccccggagctggcccatggggagcaggcgcccggtgccggccacgacgaccgccaccgcccgcgccgcgaccggccggtgaagcccagggacccccctctgggagagccccatgagggcaggagagtg

SEQ ID NO: 647 - DNA, 139 bp, Artificial Sequence
  Description of Artificial Sequence: Synthetic polynucleotide
cttttttagcgccatctgctcgcggcgccgcctcctgctcctcccgctgctgctgccgctgccgccctgagtcactgcctgcgcagctccggccgcctggctccccatactagtcgccgatatttggagttcttacaac

SEQ ID NO: 648 - DNA, 80 bp, Artificial Sequence
  Description of Artificial Sequence: Synthetic oligonucleotide
atcttcttggagcgctttaggctggccggcggcgctgggaggtggagtcgttgctgttgctgtttgtgagcctgtggcgc

SEQ ID NO: 649 - DNA, 348 bp, Artificial Sequence
  Description of Artificial Sequence: Synthetic polynucleotide
aggaatgcgggatcctggggttccccgcacgtggctggtgcccaggcagttccgcggttgcttagagacgggactgtggctgccctcatccccattgcgtcttttttttttttttttttttttacctccaccgccttctagtctcaccgaaggcttgtggccatctctgtaaagtttctggggaggtgggcacggggtaaacgccggagggttctgtggagcctatgggactgactggaggccaaagaactttgggccgcagatgtacaccagcgtcactcttttggtctgttagggccttcatcgctcacatcaggtttcagtgtgaaacgggaaaacatagccgca

SEQ ID NO: 650 - DNA, 120 bp, Artificial Sequence
  Description of Artificial Sequence: Synthetic polynucleotide
ctgcccaccgggcccaccgcgccgccaccccgaccccgctgcgcacggcctgtccgctgcacaccagcttgttggcgtcttcgtcgccgcgctcgccccgggctactcctgcgcgccaca

SEQ ID NO: 651 - DNA, 181 bp, Artificial Sequence
  Description of Artificial Sequence: Synthetic polynucleotide
agccctctctcccgccgcccgcccgccacccgccagcccaggtgcccgcccgccagtcagctagtccgtcggtccgcgcgtccctctgtcccggagcccgcagatcgcgacccagagcgcgcggggccgagagccgagagacagtcccgggcgcagcgcggagctccgggccccgagatcc

SEQ ID NO: 652 - DNA, 159 bp, Artificial Sequence
  Description of Artificial Sequence: Synthetic polynucleotide
cggccccagaaaacccgagcgagtagggggcggcgcgcaggagggaggagaactgggggcgcgggaggctggtgggtgtggggggtggagatgtagaagatgtgacgccgcggcccggcgggtgccagattagcggacgcggtgcccgcggttgcaacg

SEQ ID NO: 653 - DNA, 190 bp, Artificial Sequence
  Description of Artificial Sequence: Synthetic polynucleotide
gcctggcgcgcagagtgcaccttcctgagctcgagcggtccagcgccaagttcggggtttggggttggagcggctggtcacgtggctggcccgcggcggtgcgcggggcgttgggtcagcgggtctgggactggtggcaccggcggcggcgtaggacggaggcgtcgctaggcagcttcgaaccagtgca

SEQ ID NO: 654 - DNA, 257 bp, Artificial Sequence
  Description of Artificial Sequence: Synthetic polynucleotide
acaaggcagcctcgctcgagcgcaggccaatcggctttctagctagagggtttaactcctatttaaaaagaagaacctttgaattctaacggctgagctcttggaagacttgggtccttgggtcgcaggtgggagccgacggggtctcactccattgcccaggccagagtgcggggatatttgataagaaacttcagtgaaggccgggcgcggtggctcatgcccgtaatcccagcattttcggaggccgaggcatc

SEQ ID NO: 655 - DNA, 107 bp, Artificial Sequence
  Description of Artificial Sequence: Synthetic polynucleotide
cctgccctggtgaaaatgcttggttcaccagtggattctgtgttgttttatgccattacaactctccacaaccttttattacatcaagaaggagctaaaatggcagt

SEQ ID NO: 656 - DNA, 231 bp, Artificial Sequence
  Description of Artificial Sequence: Synthetic polynucleotide
gtcatatctccgtacctcacttcctgacacaaacaagttttcactgttgtcagcaacaaagccctaatatagctgcggaagagaaaaactgcattgcattttgcctcctgcaagcatcatcaacagttactggaggaacgtaattccagaaagcttgaaagccgtggtgatggtaattatgtatcaaatgcctggttctatttctgttattattgttttgtcatttctgtt

SEQ ID NO: 657 - DNA, 167 bp, Artificial Sequence
  Description of Artificial Sequence: Synthetic polynucleotide
atatagagacgtttccgcctcctgcttgaaactaacccctctttttctccaaaggagtgcttgtggagatcggatcttttctccagcaattgggggaaagaaggctttttctctgaattagcttagtgtaaccagcggcgtatattttttaggcgccttttcgaaaa

SEQ ID NO: 658 - DNA, 240 bp, Artificial Sequence
  Description of Artificial Sequence: Synthetic polynucleotide
cctcccctggggaggctcgcgttcccgctgctcgcgcctgcgccgcccgccggcctcaggaacgcgccctcttcgccggcgcgcgccctcgcagtcaccgccacccaccagctccggcaccaacagcagcgccgctgccaccgcccaccttctgccgccgccaccacagccaccttctcctcctccgctgtcctctcccgtcctcgcctctgtcgactatcaggtgaactttgaaccagg

SEQ ID NO: 659 - DNA, 81 bp, Artificial Sequence
  Description of Artificial Sequence: Synthetic oligonucleotide
tcttcaaattggaattatagaaagtagagggagggatagtctaccgtctctcactggattggtgccacctaaaacattgtt

SEQ ID NO: 660 - DNA, 202 bp, Artificial Sequence
  Description of Artificial Sequence: Synthetic polynucleotide
agagaaggcctcgcacaaaacactgtacaaacccgaaaggaagtctgagagacgaaccgccttcctccctgaagcttctagaactggagcagaaagaaggtgtggcccagggccagccccgcctcctccccgggcggaagctgtgtcagttgccggaagtcggcgtgaggtggggcttatgcggcggcgtggtgaaatagat

SEQ ID NO: 661 - DNA, 169 bp, Artificial Sequence
  Description of Artificial Sequence: Synthetic polynucleotide
ggcgccgcggggccgcgcgtccaggcggcgagcggaagtgggtgtgagagcggaagtggccggctagagccgggggctgggcggggaccgggcttgtcggtgaagcggcagtggcggcggcggcggcggctcggcaggcgggttcaggcttcgggggccagccgccgcc

SEQ ID NO: 662 - DNA, 99 bp, Artificial Sequence
  Description of Artificial Sequence: Synthetic oligonucleotide
tggagttggggagttgcctggagggcgggagggaggcggcggaggaagagggcgagcctgaggtgaaaaagcggcgacttctgtgtgtggagtttgcct

SEQ ID NO: 663 - DNA, 188 bp, Artificial Sequence
  Description of Artificial Sequence: Synthetic polynucleotide
gcgcccgccgtgtgagcagcagcagcggctggtctgtcaaccggagcccgagcccgagcagcctgcggccagcagcgtcctcgcaagccgagcgcccaggcgcgccaggagcccgcagcagcggcagcagcgcgccgggccgcccgggaagcctccgtccccgcggcggcggcggcggcggcggcaac

SEQ ID NO: 664 - DNA, 100 bp, Artificial Sequence
  Description of Artificial Sequence: Synthetic polynucleotide
gacagctcaagggactcagccaactggctcacgcctccccttcagcttctcttcacgcactccaagatctaaaccgagaatcgaaactaagctggggtcc

SEQ ID NO: 665 - DNA, 263 bp, Artificial Sequence
  Description of Artificial Sequence: Synthetic polynucleotide
aggagaaggagaaggaggaggactaggaggaggaggacggcgacgaccagaaggggcccaagagagggggcgagcgaccgagcgccgcgacgcggaagtgaggtgcgtgcgggctgcagcgcagaccccggcccggcccctccgagagcgtcctgggcgctccctcacgccttgccttcaagccttctgcctttccaccctcgtgagcggagaactgggagtggccattcgacgacagtgtggtgtaaaggaattcattagcc

SEQ ID NO: 666 - DNA, 368 bp, Artificial Sequence
  Description of Artificial Sequence: Synthetic polynucleotide
gtcacttcctgccgggctgcgggcgcctgagcggctcttcagcgtttgcgccggcggctgccgcgtctctctcggctcccgcttcctttgaccgcctcccccccccggcccggcggcgcccgcctcctccacggccactccgcctcttccctcccttcgtcccttcttcctctcccttttttccttcttccttcccctcctcgccgccaccgcccaggaccgccggccgggggacgagctcggagcagcagccagagtttattaaccacttaacctctcagaactgaacaaagacaacattgttcctggaacgccctctttttaaaaaagaaagcataacccctactgtagaactaaatgcactgtgc

SEQ ID NO: 667 - DNA, 293 bp, Artificial Sequence
  Description of Artificial Sequence: Synthetic polynucleotide
gtcacttcctgccgggctgcgggcgcctgagcggctcttcagcgtttgcgccggcggctgccgcgtctctctcggctcccgcttcctttgaccgcctcccccccccggcccggcggcgcccgcctcctccacggccactccgcctcttccctcccttcgtcccttcttcctctcccttttttccttcttccttcccctcctcgccgccaccgcccaggaccgccggccgggggacgagctcggagcagcagccagaaagcataacccctactgtagaactaaatgcactgtgc

SEQ ID NO: 668 - DNA, 339 bp, Artificial Sequence
  Description of Artificial Sequence: Synthetic polynucleotide
gtcacttcctgccgggctgcgggcgcctgagcggctcttcagcgtttgcgccggcggctgccgcgtctctctcggctcccgcttcctttgaccgcctcccccccccggcccggcggcgcccgcctcctccacggccactccgcctcttccctcccttcgtcccttcttcctctcccttttttccttcttccttcccctcctcgccgccaccgcccaggaccgccggccgggggacgagctcggagcagcagccaggtagaactttagacttcatagcactgaattaacctgcactgaaagctgtttacctgcatttgttcacttttgttgaaagtgacc

SEQ ID NO: 669 - DNA, 451 bp, Artificial Sequence
  Description of Artificial Sequence: Synthetic polynucleotide
gtcacttcctgccgggctgcgggcgcctgagcggctcttcagcgtttgcgccggcggctgccgcgtctctctcggctcccgcttcctttgaccgcctcccccccccggcccggcggcgcccgcctcctccacggccactccgcctcttccctcccttcgtcccttcttcctctcccttttttccttcttccttcccctcctcgccgccaccgcccaggaccgccggccgggggacgagctcggagcagcagccagagtttattaaccacttaacctctcagaactgaacaaagacaacattgttcctggaacgccctctttttaaaaaaggtagaactttagacttcatagcactgaattaacctgcactgaaagctgtttacctgcatttgttcacttttgttgaaagtgaccatgtctcaagttcaagtgcaagttcagaacccatctg

SEQ ID NO: 670 - DNA, 537 bp, Artificial Sequence
  Description of Artificial Sequence: Synthetic polynucleotide
gtcacttcctgccgggctgcgggcgcctgagcggctcttcagcgtttgcgccggcggctgccgcgtctctctcggctcccgcttcctttgaccgcctcccccccccggcccggcggcgcccgcctcctccacggccactccgcctcttccctcccttcgtcccttcttcctctcccttttttccttcttccttcccctcctcgccgccaccgcccaggaccgccggccgggggacgagctcggagcagcagccaggtggagttttgctcttgtcgcccaggctggagtgcagtggcgtgatctcggctcactgcaacctccacctcccaggttcaagcgattttcccacttcagcctcccgataagctgagattacagagtttattaaccacttaacctctcagaactgaacaaagacaacattgttcctggaacgccctctttttaaaaaaggtagaactttagacttcatagcactgaattaacctgcactgaaagctgtttacctgcatttgttcacttttgttgaaagtgacc

SEQ ID NO: 671 - DNA, 381 bp, Artificial Sequence
  Description of Artificial Sequence: Synthetic polynucleotide
gccggagcggccaggccgccgtctgcccgtcccgctggacgtcccgcggtccgccctcccgtgcgtccgtctgccggtgagcccgcccgcccgccggcccagaacagagaacagaagctcagagaagtgaagcaacttgcccagctatgagagacagagccaggatttgaaaccagatgaggacgctgaggcccagagagggaaagccacttgcctagggacacacagcggggagaggtggagcagggcctctatttcgagacccctgactccacacctggtgtttgtgccaagaccccaggctgcctcccaggtcctctgggacagcccctgccttctaccaggaccatgggtagcaacaagagcaagcccaaggatgcc

SEQ ID NO: 672 - DNA, 336 bp, Artificial Sequence
  Description of Artificial Sequence: Synthetic polynucleotide
aggtttcagtagcggcgctgcgcgcaggccgggaacacgaggccaagagccgcagccccagccgccttggtgcagcgtacaccggcactagcccgcttgcagccccaggattagacagaagacgcgtcctcggcgcggtcgccgcccagccgtagtcacctggattacctacagcggcagctgcagcggagccagcgagaaggccaaaggggagcagcgtcccgagaggagcgcctcttttcagggaccccgccggctggcggacgcgcgggaaagcggcgtcgcgaacagagccagattgagggcccgcgggtggagagagcgacgcccgagggg

SEQ ID NO: 673 - DNA, 213 bp, Artificial Sequence
  Description of Artificial Sequence: Synthetic polynucleotide
gtgtgaatgcttcattcgcctcacaaacaaccacagaaccacaagtgcggtgcaaactttctccaggaggacagcaagaagtctctggtttttaaatggttaatctccgcaggtcactaccagccaccgagaccaacagagtcatttaaggctgcaagcagtatttacaacagagggtacaagttctatctgaaaaaaaaaggagggactatg

SEQ ID NO: 674 - DNA, 105 bp, Artificial Sequence
  Description of Artificial Sequence: Synthetic polynucleotide
atgagcaaggcgtttgggctcctgaggcaaatctgtcagtccatcctggctgagtcctcgcagtccccggcagatcttgaagaaaagaaggaagaagacagcaac

SEQ ID NO: 675 - DNA, 212 bp, Artificial Sequence
  Description of Artificial Sequence: Synthetic polynucleotide
agggccagacgttcttcgccgagagtcgtcggggtttcctgcttcaacagtgcttggacggaacccggcgctcgttccccaccccggccggccgcccatagccagccctccgtcacctcttcaccgcaccctcggactgccccaaggcccccgccgccgctccagcgccgcgcagccaccgccgccgccgccgcctctccttagtcgccgcc

SEQ ID NO: 676 - DNA, 140 bp, Artificial Sequence
  Description of Artificial Sequence: Synthetic polynucleotide
gctccgccattcgcgggaaggcgtttgtggtgccagagaaaagtagccagagcggcgcagtggcggccgcgttctgtggttttccgctattcccccagacccgcaccttctcggcctctttgcggagaatcgtgaccaag

SEQ ID NO: 677 - DNA, 319 bp, Artificial Sequence
  Description of Artificial Sequence: Synthetic polynucleotide
actaggactcaagatggccaccgcgcccgctagtcatctcgctagcccgcgcgccagtgagctggcacgagacacgcggtggcccacggcgtctggggacgatctccagcccttcgcacggggcggagcgcccgccttccctccaatcagcacgccgggccggctagccaggggccgcccgcgcgcggggtgtgtgaggacgcgctcccagtcgctgagtgcctgagccgggaagcagttgctgtggtacctgctgctgcccgagcggacgtagagcatcggacgcgggcgccgtggcgctgggcaggagggcgaagcc

SEQ ID NO: 678 - DNA, 186 bp, Artificial Sequence
  Description of Artificial Sequence: Synthetic polynucleotide
tgcggccgggggaacccagtttccgaggaacttttcgccggcgccgggccgcctctgaggccagggcaggacacgaacgcgcggagcggcggcggcgactgagagccggggccgcggcggcgctccctaggaagggccgtacgaggcggcgggcccggcgggcctcccggaggaggcggctgcgcc

SEQ ID NO: 679 - DNA, 1014 bp, Artificial Sequence
  Description of Artificial Sequence: Synthetic polynucleotide
attctgaattatttccgcgatgcctggaacatcttcgactttgtgactgttctgggcagcatcaccgatatcctcgtgactgagtttgggaataacttcatcaacctgagctttctccgcctcttccgagctgcccggctcatcaaacttctccgtcagggttacaccatccgcattcttctctggacctttgtgcagtccttcaaggccctgccttatgtctgtctgctgatcgccatgctcttcttcatctatgccatcattgggatgcaggtgtttggtaacattggcatcgacgtggaggacgaggacagtgatgaagatgagttccaaatcactgagcacaataacttccggaccttcttccaggccctcatgcttctcttccggagtgccaccggggaagcttggcacaacatcatgctttcctgcctcagcgggaaaccgtgtgataagaactctggcatcctgactcgagagtgtggcaatgaatttgcttatttttactttgtttccttcatcttcctctgctcgtttctgatgctgaatctctttgtcgccgtcatcatggacaactttgagtacctcacccgagactcctccatcctgggcccccaccacctggatgagtacgtgcgtgtctgggccgagtatgaccccgcagcttggggccgcatgccttacctggacatgtatcagatgctgagacacatgtctccgcccctgggtctggggaagaagtgtccggccagagtggcttacaagcggcttctgcggatggacctgcccgtcgcagatgacaacaccgtccacttcaattccaccctcatggctctgatccgcacagccctggacatcaagattgccaagggaggagccgacaaacagcagatggacgctgagctgcggaaggagatgatggcgatttggcccaatctgtcccagaagacgctagacctgctggtcacacctcacaagtccacggacctcaccgtggggaagatctacgcagcc

SEQ ID NO: 680 - DNA, 63 bp, Artificial Sequence
  Description of Artificial Sequence: Synthetic oligonucleotide
gtgtccctgcagctgcgcggaggccacttctgcggcgccaccctgattgcgcccaacttcgtc

SEQ ID NO: 681 - DNA, 95 bp, Artificial Sequence
  Description of Artificial Sequence: Synthetic oligonucleotide
gtaagggaggggagttggatatacctcgcctaatatctcctgggttgacaccatcattattgtttattcttgtgctccaaaagccgagtcctctg

SEQ ID NO: 682 - DNA, 98 bp, Artificial Sequence
  Description of Artificial Sequence: Synthetic oligonucleotide
ttttaactaggttatttataatgtatttctgaaccacttggcagacaaattcacaacacttaatgttcatattttgagtaaaggaagctaaaaccatg

SEQ ID NO: 683 - DNA, 518 bp, Artificial Sequence
  Description of Artificial Sequence: Synthetic polynucleotide
gtcgccgctgcagctccgggggctcccaggggagcgtgcgcggaacctccaggcccagcaggaccccggctgcggcgaggaggaaggagccagcctagcagcttctgcgcctgtggccgcgggtgtcctggaggcctctcggtgtgacgagtgggggacccgaaggctcgtgcgccacctccaggcctggacgctgccctccgtcttctgcccccaataggtgcgccggaccttcaggccctggggtgaattcagctgctcctacatcagcttccggaaccaccaaaaattcaaattgggattttccggagtaaacaagagcctagagccctttgctcaatgctggatttaatacgtatatatttttaagcgagttggttttttcccctttgatttttgatcttcgcgacagttcctcccacgcatattatcgttgttgccgtcgttttctctccccgcgtggctccttgacctgcgagggagagagaggacaccgaagccgggagctcgcagggacc

SEQ ID NO: 684 - DNA, 94 bp, Artificial Sequence
  Description of Artificial Sequence: Synthetic oligonucleotide
gaggcctagagccacatggttcagtccccgcctctgggcctctgtggggacagcctcacccttaagctagtcccttctcccctttgcagacgag

SEQ ID NO: 685 - DNA, 147 bp, Artificial Sequence
  Description of Artificial Sequence: Synthetic polynucleotide
agtttcctcggcagcggtaggcgagagcacgcggaggagcgtgcgcgggggccccgggagacggcggcggtggcggcgcgggcagagcaaggacgcggcggatcccactcgcacagcagcgcactcggtgccccgcgcagggtcgcg

SEQ ID NO: 686 - DNA, 278 bp, Artificial Sequence
  Description of Artificial Sequence: Synthetic polynucleotide
gcggccgcgggctcccgctaaccgcagcctccactcctctccccgcgcgccgcgcccccgccccgccccgcccggtctcgccggccgagcgtccgttggtccttgagcgcgtccgacagtctgtctgttcgcgatcctgccggagccccgccgccgccggcttggattctgaaaccttccttgtatccctcctgagacatctttgctgcaagatcgaggctgtcctctggtgagaaggtggtgaggcttcccgtcatattccagctctgaacagcaac

SEQ ID NO: 687 - DNA, 335 bp, Artificial Sequence
  Description of Artificial Sequence: Synthetic polynucleotide
aggggacgcagcgaaaccggggcccgcgccaggccagccgggacggacgccgatgcccggggctgcgacggctgcagagcgagctgccctcggaggccggcgtggggaagatggcccagtccaccgccacctcccctgatgggggcaccacgtttgagcacctctggagctctctggaaccagacagcacctacttcgaccttccccagtcaagccgggggaataatgaggtggtgggcggaacggattccagcatggacgtcttccacctggagggcatgactacatctgtcatggcccagttcaatctgctgagcagcaccatggaccagatg

SEQ ID NO: 688 - DNA, 160 bp, Artificial Sequence
  Description of Artificial Sequence: Synthetic polynucleotide
ggctgcctcgcaggggctgcgcgcagcggcaagaagtgtctgggctgggacggacaggagaggctgtcgccatcggcgtcctgtgcccctctgctccggcacggccctgtcgcagtgcccgcgctttccccggcgcctgcacgcggcgcgcctgggtaac

SEQ ID NO: 689 - DNA, 194 bp, Artificial Sequence
  Description of Artificial Sequence: Synthetic polynucleotide
gcttggtgctgcatctcaatccctgtggccccaggagcagctgcggcaggaacatgtatggatttatcaacacctgtctgcaatctcttgtgatagagaaatttggtgaagaaacatgggaaaaattgaagtgtctccatggaagccatcctgaaactctttggagaatactttcaattctgaagatgtctggc

SEQ ID NO: 690 - DNA, 177 bp, Artificial Sequence
  Description of Artificial Sequence: Synthetic polynucleotide
gacagggactggaagagaggacgcggtcgagtaggtgtgcaccagccctggcaacgagagcgtctaccccgaactctgctggccttgaggtggggaagccggggagggcagttgaggaccccgcggaggcgcgtgactggttgagcgggcaggccagcctccgagccgggtggacac

SEQ ID NO: 691 - DNA, 174 bp, Artificial Sequence
  Description of Artificial Sequence: Synthetic polynucleotide
caggtgttgcggccccgcagcgcccgcgcgctcctctccccgactcggagcccctcggcggcgcccggcccaggacccgcctaggagcgcaggagccccagcgcagagaccccaacgccgagacccccgccccggccccgccgcgcttcctcccgacgcagagcaaaccgccca

SEQ ID NO: 692 - DNA, 279 bp, Artificial Sequence
  Description of Artificial Sequence: Synthetic polynucleotide
tccagcggtccaatcgagaagtaagtagtccgagctgcgagcataactctaccagagaaacgcgcactttattggtcaagacagacggaagccggcggttggacgcaaaggttgactcggaagctgagagattgttgagtaacacgcagaagtcttgaaagtatcaagtattgaacatatttcaagggacttggtttcggtgaagtcgtcaattccttttatcgtcaacgtttccacagccctcagaatagaaatttccaacaagccaaagcctacgta

SEQ ID NO: 693 - DNA, 365 bp, Artificial Sequence
  Description of Artificial Sequence: Synthetic polynucleotide
ttaagatactttttctaaaaagatttatttccagagtgttcccatgttggtttaaaattcactgttttcaacattttagagcaatacctcatctacttgattttgtgtctgctgaagtcttcggttgctgccagaggcagcacttgaccctggggttgcacctgcagacctgaaatgggtaaaggcacaagcatgagtaaactatgattccagatacattttttataagtatgaagacattatcccaaggcatcactgtttaaaggttcagaacttaagcagaaaaagaaacccttcctacagtaaggaacaaaggttctaatgacatttcttctaattcctctataatttccaggattcatcat

SEQ ID NO: 694 - DNA, 1730 bp, Artificial Sequence
  Description of Artificial Sequence: Synthetic polynucleotide
ttcagttgtgaatgaatggacgtgccaaatagacgtgccgccgccgctcgattcgcactttgctttcggttttgccgtcgtttcacgcgtttagttccgttcggttcattcccagttcttaaataccggacgtaaaaatacactctaacggtcccgcgaagaaaaagataaagacatctcgtagaaatattaaaataaattcctaaagtcgttggtttctcgttcactttcgctgcctgctcaggacgagggccacaccaagaggcaagagaaacaaaaagagggaacataggaacaggaaccagataatagtgacataagcgaccctttcgcaaatattttggcgcaaaatgagcgggcgccaagtgccgcgtggtggagccgcctgaaaatgacatggaaaattcgccgaaaatcgcgcgttttggcagcatcaatcccaaagcacaaaattaatttctatcataatttctgggtgcaacacggacccataattgaatcgaatatagggcttatctgatagcccggcagcaacattgaactttccggctgcaaaggagacgacaccgagatcgccaattttcgttgggctcgttctctgggctccggcgataagaaatccatgctgataaggacaggaggacggtctgcggcaaattgaattcgattctgacctgtatgaaagccagcggagatacggatacctctgggtttatgggtagaaaacgcagagcgtcgcgccaacatcgaaattatttgcgtttgcatcttctcgtcctttcgtttatcgttctgattgccatcgtggtggcgcggtttctattaattttgcttctgtatcgtttgcaaaatctcaaaagattcaaaaagttcgtcatcagcagccgcaacacaaaaaccaacgagtgtaaagccgagcatacaaatatcaataaaaacataaacatttacccaatctcaatctcaaaacattcgcatcgtttccacacaaatatgcttagttcgcccaaattgtgattgtatatatatatttaacggcattaaatacaaaagattaagccctaaattaagtgtaaatcttacaaaacgtctacgtttttaaacaagaaattgtgatattatatattaatcgggaaattcgaagtatgagaacaaaacggtgtatatatgtaagtgggcgatgaacatcaatgaatattttagctgagcaaagtacacacgaatgaatataaatatacatgaaaatatattttgggcaccgacttttacaccacaattatatatcgatagaaaagacacgaaaacaatcacagaaaactaagagtttcaaaatcaaaattgaggaataccaactagaggataaggctacttaaggatcaaaaaacaccaaggagacgagattttctaccaaatcgagagacgaggggcaggttaatttcgtcatttttggccaagacagcaaatagaggaacagcaaagcgaaaatcattttatacctcacacaacaactacacactaactaagattaggctacgcaactgtacattgtacttaagtgttcaaagtatatttagtttactttgtatataagaaaagtagctaaaagcacgcggacagggaggcaggagcaccacagtcactagccactaagcagagtcacagtcacgatcacgttcactccaggatcaggactcggggcgggatcagcagacgctgaggaagctgccacg

SEQ ID NO: 695 - DNA, 255 bp, Artificial Sequence
  Description of Artificial Sequence: Synthetic polynucleotide
tcaattctattcaaacaagtaaagtgaacacatcgctaagcgaaagctaagcaaacaaacaagcgcagctgaacaagctaaacaatctgcaataaagtgcaagttaaagtgaatcaattaaaagtaaccaacaaccaagtaattaaactaaaaactgcaactactgaaatcaaccaagaagtaattattgaagacaagaagagaactctgaatactttcaacaagtcgttaccgaggaagaagaactcacacaca

SEQ ID NO: 696 - DNA, 149 bp, Artificial Sequence
  Description of Artificial Sequence: Synthetic polynucleotide
agtcttgaaaaaaatttcgtacggtgtgcgtcgtaacaacaagcagcgtctgaaaagttttgtgaatttccaattctatacaaagcaaagtgaaaatatctgtatttttacctttattctgtgaatagaacgaaaaacatacatacaag

SEQ ID NO: 697 - DNA, 200 bp, Artificial Sequence
  Description of Artificial Sequence: Synthetic polynucleotide
ccatcgcagcgaacgcatctcgaaaaaatcattgaataagagagacaccagaacaaagtgaacgaactcgaaaatacgaaagaaaagtgtgtgcgccagcaacaaagaactaactcgataaatattcattgtgcagaagagaaagttattgagtcactaccagttgtgtaattccgaacgagaagaaagataaaccaaca

SEQ ID NO: 698 - DNA, 963 bp, Artificial Sequence
  Description of Artificial Sequence: Synthetic polynucleotide
acattcgttcgatggcaacggattggataacaggcgcgcgctttgttttattatccacattatcagcggcattattgttattattggccctcagcgctttaccgctcgcccacgcgtccgcccgtgaatgccgcgcggaaaagtcgctttccactagattggcgtccagattcgaggaaatccgtcagcagacgcattcgcgcccgttcggtcagcactatggctaataatcgttcaaatcgttaaaaccataaaaataataataataattgcaataacaataaacatagtaataatcgtaacgcttacgagcctttgatagtgccaaggcaagcgcaatccaagtattcaaattcgaattcaattaacagcaaagtgcaattggctaaaaaccgaaaccaaaacgcaacaaagtatacgaaacacttgtgaaaccgtacaaacaattgtggaaaaaaatttaaagattattaagattgaagtctcaataaacattagtgcttaaataaatttaaaacgacccgcgtggagagtgcaataaaaagaataacttttgaaataaatatttaccaaacagaaaaatattttataaatatttaaataagtgaaaaacaaattggttactctgaaacaaagaaaattcaaattggtgctaaaacaaaggagaaaaaatttcaagaatattttacaaataataagacatatttaactatataaaaccaaacttaatcaacaaagacttggagtgaaaatataaaataaattttaaaaagagtttaacaaaatttgtttaaatccaaaggaggcaaaggaacagcacagaaagcgaggaaacactcaaataaaatccgccaaaaatcgcagatccctggaaaccaattcgtgtgaaatcggtcaagcccccaacgacttttagcccgtctcagacggagcaccgccaagattcttaccgccagcagcgca

SEQ ID NO: 699 - DNA, 301 bp, Artificial Sequence
  Description of Artificial Sequence: Synthetic polynucleotide
gcgccggagcgggcagggccgagcggcagcgcggagccggggtactcgcggcggcggcggcggcggcaggagcggcgcggcccggcccggcggcggcacagcgcggcgaggcggcccgggaagcacagcgaggcccgcggggcgccgcccgcgccgggaggagcggcggcgtcccggcgagaagtaagagctccgcgcactccttcctccaacccgcgcggccgggagcggtgtggggcggcggccgggaccgtccagcgcgctgccgcggctcccggcgccactccgcgggctctgttct

SEQ ID NO: 700 - DNA, 82 bp, Artificial Sequence
  Description of Artificial Sequence: Synthetic oligonucleotide
gggttccctcagcggatcgggccacctcggggagcggcgccccttttctttcgggtcgttgctgcagagggaaaactccagc

SEQ ID NO: 701 - DNA, 166 bp, Artificial Sequence
  Description of Artificial Sequence: Synthetic polynucleotide
ccgccgcccattcagcgcaacagccgtcggtcctctcgctttcccgtaggggccgtcggcgttcgtttgaaacgcggtccacccgtcccagcgtagccggcgctcttcggcgccgcgcgcaaacttcccgagccggcgggtgcgggcggtggcagcggggcccgga

SEQ ID NO: 702 - DNA, 286 bp, Artificial Sequence
  Description of Artificial Sequence: Synthetic polynucleotide
gcacagagcctcctcggctgaggggacgcgaggactgtcctcgccgccgtcgcgggcagtgtctagccaggccttgacaagctagccggaggagcgcctaggaacccgagccggagctcagcgagcgcagcctgcagctcccgcctcgccgtcccggggggcgtcccgcctcccaccccgcctctggacttgtctctttctccgcgcgcgcggacagagccggcgtttaggcccgagcgagcccgggggccgccggccgggaagacaacgcgggcaccgattcgcc

SEQ ID NO: 703 - DNA, 200 bp, Artificial Sequence
  Description of Artificial Sequence: Synthetic polynucleotide
cgagtctctgagaagagggagcataggctgtgctgatttaaaaacagaaaatgcaaagttggactgaaaatatcccacgtcttctaagcaatctgcttaaggcttccaaacttaccttaatttggtaagaaaataagctgccctatttttctttcttcttctcttacaactggaagcagccatttccccaaaccaccacc

SEQ ID NO: 704 - DNA, 418 bp, Artificial Sequence
  Description of Artificial Sequence: Synthetic polynucleotide
ctggcgtcccggccgaggcagcatcccagcctttaccctgtgggcccaacgtgaggagtgtgaggagcggcatgcggcgccccctggctggttcggtgtcttttgacctgctgttgactgctcccagggggccctgacgccctggggcacttttgctctgcacaggaccacgctggggtttgccatggtgacataaaggggtgtagaggaaggaaggagcaagaccagcctgtagactgtgcccctggctgggcaaaagggccaggggcccggagccttccctccactgccctcgaacgcctcacttcctaagtctctgcatttctcagtcagtggacagcttttgggactcttgtgtgaggactttgggggaccaggccaggctgggcctctgctgattgagatcttgggatccaga

SEQ ID NO: 705 - DNA, 750 bp, Artificial Sequence
  Description of Artificial Sequence: Synthetic polynucleotide
tgccacccggcgtggaggacggggtccaccctggtgggctgagcgcgaggccggagggctgggaggctgcggctgggctgagcactgcggagggccgtcggcttatcccaggtcccggtcacgcagcggccacgctcggggagcgcgcggacctgagcgggcaccacgagccgcagcgcgccgcctccccctggtgggagcggtacttgagcccgactgcggcggagcgttcgctcggagatggcggagccgccgcgacgcggcccgaggccccgcgagcagggaagccgggcagccccgggacgcggcagggcccggggacagcggggacgccgcccactccaccgggtatgaagctaaaatacagtggttacaacacaggaggttgacaggcctgacctttgaatcccagttcatccacaaacggagctttgtaatctcggattgtaagggccaagcttgtggactttagtgacttctgatctaagaacctccaccagggctgagggagctcaagtttcagcctgaggcatgggccaggaggccatggtgacctgagacccgtggattctgtccagtacaccctgttgctccttctgcctcccctctcctgtattgaaagcgtttgtgttcatcttatcagggacctgaccctaagagaatccttcccctgccaaggcagttccagcccccagaactcatcaccccatctcctgaggtggttcctatcctccctctcttctcctcgcc

SEQ ID NO: 706 - DNA, 247 bp, Artificial Sequence
  Description of Artificial Sequence: Synthetic polynucleotide
ctgggggaggcggctgcagccgtggctctgcagcgagagcgcagagaagcagaggaccaagaggcagaatgccggcgctccaccgcccgagactgtgtttcctgtgagtccagatgtgtgatccagatatgctgcaatggtgacataaactgttgactgagactaggagcgtgcctgaaactccatccctcctcctattattttttaatggtgcttctactggaatagtcaacaaagtgcacccaac

SEQ ID NO: 707 - DNA, 515 bp, Artificial Sequence
  Description of Artificial Sequence: Synthetic polynucleotide
agaagcagacaggagcagctggtattccggtgattaaatagttctcatagcctttttgctgtacccggtctgctccctggggtaaggctcgtgtccgagaaggaagctgcattttaacggtgtgctgaacagaggtctgaatcattccagctggctgcttgttttgaaaaggacaatgtgtgtataaataaaaagactgctggaagggtccagacaccggcaccggagctgaggagtgctctcagaatcctgttgaggcagatggcacgaactgaaagctccgctaattaacgtggagccaagtaaacctgaattctggatatctcattttctaacttcggataaattcaagttagcaaaagaaaaaaaaattgaaatgcttctctagataatgcttaaaggaccctgcagcagttcttggtattggacatagcatctcagctgttgcctcctggtccgctgactaccagatttgactcatttgtgattccttcgagaatctcccatgatttgca

SEQ ID NO: 708 - DNA, 59 bp, Artificial Sequence
  Description of Artificial Sequence: Synthetic oligonucleotide
tttataatttcttcttccagaacacctctgaaagcttggtcaagggtacattttttttc

SEQ ID NO: 709 - DNA, 1021 bp, Artificial Sequence
  Description of Artificial Sequence: Synthetic polynucleotide
agcgcagaggcttggggcagccgagctgcagcgaggccgcggcactgggggcgagctgagcggcggcagcggagctctgtcgcgagacgcagcgacaaggcagactattcagcggactcaccagcccgggagtctgtgctctgggatttgatattcaaacctcttaatttttttttcttaaactgtattgttttacgctttaatttatttttgcttcctattcccctcttaaatcgtgccaacggtttgaggaggttggttcttcactccctcaaatcacttcggattgtggaaatcagcagacgaaagaggtatcaagagctccagagagaagtcaaggaagagagagagagaccggtcagagagagcgcgctggcgagcgaacagagagagggacaggggcaaagtgactgacctgcttttgggggtgaccgccagagcgcggcgtgagccctcccccttgggatcttgcatcggaccagtcgcgctgacggacagacagacagacaccgcccccagccccagcgcccacctcctcgccggcgggctgccgacggtggacgcggcggcgagccgcgaggaaccgaagcccgcgcccggaggcggggtggagggggtcggggctcgcgggattgcacggaaacttttcgtccaacttctgggctcttctcgctccgtagtagccgtggtctgcgccgcaggagacaaaccgatcggagctgggagaagtgctagctcgggcctggagaagccggggcccgagaagagaggggaggaagagaaggaagaggagagggggccgcagtgggcgctcggctctcaggagccgagctcatggacgggtgaggcggccgtgtgcgcagacagtgctccagccgcgcgcgcgccccaggccccggcccgggcctcggttccagaagggagaggagcccgccaaggcgcgcaagagagcgggctgcctcgcagtccgagccggagagggagcgcgagccgcgccggccccggacgggcctccgaaacc

SEQ ID NO: 710 - DNA, 453 bp, Artificial Sequence
  Description of Artificial Sequence: Synthetic polynucleotide
ggcacgaggctcccattaatatttcttcttctgtgtaattccattattctgtagtagattcacgtccgagtttaaagaagagagaaaactgaaaaggcagaaaattccagagctttagatttagccaaagatagttatggtcgtgttgttcttggtgaagattggcaaagtaggagccaatggaagaaactaagatcataatcaatcgccccaaaaacaaccttgttcattctatggtttttctcttcggtttctatgtttgggattgggaattcctcactgtccttttgcttttcagttattgctccttctaattttccctagctaggatcttctcaattaatttcctttttcattttcaactaactcataattagcccaaatcttcaaaagagttttgtgtaagttgatagacgtttagagaaacagagaaatacaggggaaaaacaaggg

SEQ ID NO: 711 - DNA, 115 bp, Artificial Sequence
  Description of Artificial Sequence: Synthetic polynucleotide
gtgtttccaccactccaagaaggcagcattcagagttcttggctaagtcgaccttgtgaggagctggtgataatttgattccatctccaggttccctgtaagcacatcgagaacc

SEQ ID NO: 712 - DNA, 164 bp, Artificial Sequence
  Description of Artificial Sequence: Synthetic polynucleotide
accgattaagcacagtacctttacgttatatataggattggtgtttagctttttttcctgagcccctggttgacttgtgcatgaacacgagccatttttagtttgtttaagggaagttttttgccacccaaaacgtttaaagaagaaaagttgtttcttaaacc

SEQ ID NO: 713 - DNA, 523 bp, Artificial Sequence
  Description of Artificial Sequence: Synthetic polynucleotide
ggttcggtgttcttctcaaataaaaagattgtaatcatttagtgaaataaaaattatatttttttcacttataaatattgcaagtatttaattggcgcagtcggttaggatccaataaaataaaagagtccttttagtacggtactgatcaactgaaggatatgctatacgactagctatccaagatcagcgaattaaaatagtgattcaaaaatattttttaatccgcaaaagaatctacgtgaaagtagtattcaaaataaaatcccgtgcggtcggaaacaaaaattaatttaaattttttaattccgaaacttaaaaccaagtttaaagaaaacttaaaatcaagaaaacttaaaaccaagtttaaagaaaacttaaaatcaagaaaacttaaaaccaagtttaaagaaaacttaaaatcaagaaaacttaaaaccaagtttaaagaaaactcaaaatcaagaaaacttaaagccaaaataagctagaaaactaaaagacatcatggcagtcccacaac

SEQ ID NO: 714 - DNA, 105 bp, Artificial Sequence
  Description of Artificial Sequence: Synthetic polynucleotide
caaaataatgataacgagaataatatcaagaataccttagaacaacatcgacaacaacaacaggcattttcggatatgagtcacgtggagtattccagaattaca

SEQ ID NO: 715 - DNA, 206 bp, Artificial Sequence
  Description of Artificial Sequence: Synthetic polynucleotide
tctagactcccggcgaacactcccctccgccttcttatgctcatcccctccgcttccgaagcacaacatttcaaccagaaacactagccgaagcaaatccattccacaagcacctggtgggatcatctcatcatcagaaaccaagagagagattccgtgtccgcttgttgtagtagattgtgaggactgaggaccgagaagcagcc

SEQ ID NO: 716 - DNA, 259 bp, Artificial Sequence
  Description of Artificial Sequence: Synthetic polynucleotide
tttttttttctcgtactgtttcactgacaaaagttttttttcaagaaaaattttcgatgccgcgttctctgtgtgcaacggatggatggtagatggaatttcaatatgttgcttgaaattttaccaatcttgatattgtgataatttacttaattatgattcttcctcttcccttcaatttcttaaagcttcttactttactccttcttgctcataaataagcaaggtaagaggacaactgtaattacctattacaata

SEQ ID NO: 717 - DNA, 174 bp, Artificial Sequence
  Description of Artificial Sequence: Synthetic polynucleotide
gacgtccttgtgagcatgaggtaccctgctctacttagatcttgtttatttgtagtttccttttcaagtcagtggatctcagcgatgtacgctcaatgattccaatttttctgttcttgccttcaggttgtctattacactttcatgtcctctggacttaactctgtttcccat

SEQ ID NO: 718 - DNA, 456 bp, Artificial Sequence
  Description of Artificial Sequence: Synthetic polynucleotide
actcagcttacacacaaaaaagcagtaaaatataaaatacaaaaattaacagctgcgtttatctatagatatatatatacacatctatatatttgaataagcgttcgatttgaatcaaaattatagcccaagctatcagctacccccacaagctttgtactccacaaaaacgctaacgagcaaaatcgataaagaccagatagcaaatgaaatcataccatctgccatagatctatgctataaacatatataggtgctgatctgtgctcttgaatttagtgttttttgtgtgtgcgtgtcgcgagaggagcactcaaaaccaaaaaaaaaaaaaaaaacgtatagtaaaacaaaaaactatctctagtcgctaggctataactatacaaactccagctatcccagatccagatccgtaaacagcaaatagttatatatctataaccccaaaatacg

SEQ ID NO: 719 - DNA, 310 bp, Artificial Sequence
  Description of Artificial Sequence: Synthetic polynucleotide
ccagtatctccgctggccatcagtcaatcaatcagcagaccgcagcccaaaaatgtttcaattatgttatcgccagcaacaacgacatcgtccagaatcgaaagcatcgaaccagagcagcagcaaccacaagaaggcagccgcactgtccaggacgaaggagtaagacgtgcaattccgcaaaggctaaatccggatacggaaccggagcccactgcaaaaccgaaatcacaaggcaaccaagagcaatttagcatagcaaccgcaacgcaatcagccaggccaggatcagaagcaggacttcttagcc

SEQ ID NO: 720 - DNA, 419 bp, Artificial Sequence
  Description of Artificial Sequence: Synthetic polynucleotide
atacacaagtttctctattacgaagcaagcaaaaagtgattgatagttagttctccacaattttttttcctgtttcaaaatttttaaaattgtcaaattcagacctatgggtcccataaatgtttcgtgctgcgttccataagcaaacactaaaatatatcatccgttgaacaaatcgtgcccgtctaactgtcgcgtcaatccgctaactattgtcttgcgatgaacgacaccatggtgtagccaagagaacatcagcattagccaaaccacacagttcccaactcgatccccagagatccatcacccccacaacaagcaggcaaggcgaggtcgtccaacgccaaaaaaaaacaaacttaaaccaacttcacatacacatccggttacgacagcaacatacgtcgtagctgataaac

SEQ ID NO: 721 - DNA, 568 bp, Artificial Sequence
  Description of Artificial Sequence: Synthetic polynucleotide
cccaagtgacttaccagatcattgggcctcaggtacatcaaatccatcgacctcgaccagcagcagcagcagcagcagcattagtgccagcggcagcaacaacaacaaatacaacagcggcaacatatcggtctgcaacctgccgcgctcatcgccggccgctgcaacagcagccgttacactatcgtcggccgccggcggtattggcagcaacttgttgagcggcttgcatcacggtctggcgcccggtacgcatccactgcagcgcgcgacggcagccagcggaggcggagctggtgctgggggcgtggcaggcgcctcaacagcagcggcactcacactccagcaacatcagcaccagcagcagcaacaacaacagcagcagcaagcgcaacatcagcatcagcaccagcatcagcagcagacgcaacagcagcaattggcctaccagcaccagcaactgcagcagcagatcatctcgcatcgttccatacaaaacaaggcggcggccaccgctgccgcacaaacggcaaatcttgctgctgccctgcagcgatcggctgccatt

SEQ ID NO: 722 - DNA, 207 bp, Artificial Sequence
  Description of Artificial Sequence: Synthetic polynucleotide
aaaaaacgcttttacgaggtatcagcacttttctttcattgggggaaaggcgtgagggaagtacccaacagcagcagactttgaaactttaaacagacaggtctgagagcccgaactctccttttcctttgacttcagcctccaaggagttccaccactttggcgtgccggcttcactttcattaagtgaaagagaggtgcccagac

SEQ ID NO: 723 - DNA, 127 bp, Artificial Sequence
  Description of Artificial Sequence: Synthetic polynucleotide
gggaggcgatgaattgggacgcaggcgcgaccacagggaccactccccctacacagacatgagaccataggggagctgtctgggtggcctcaaggataggcgctccccgaggtgtgaatgaggcagg

SEQ ID NO: 724 - DNA, 270 bp, Artificial Sequence
  Description of Artificial Sequence: Synthetic polynucleotide
agcactggccgtggccgtggggcccgcgaagggcggcgcgcggctgatgaaaccggctcggattccgcccgcgtgcgccatcccctcagctagcaggtgtgagcggctttctgcccgcagtctctacacagctcagcatcctgacgcctcctccccttgcaggggcgtgaagctacttcagactctgctgtgacgacttggccgccaggcaccgatcctccccggtgagaaggtccacgaatcttactgcagacagatttgctcagcgcg

SEQ ID NO: 725 - DNA, 120 bp, Artificial Sequence
  Description of Artificial Sequence: Synthetic polynucleotide
ccgccgcccattcagcgcaacagccgtcggtcctctcgctttcccgtaggggccgtcggcgttcgtttgaaacgcggtccacccgtcccagcgtagccggcgctcttcggcgccgcgcgc

SEQ ID NO: 726 - DNA, 9 bp, Artificial Sequence
  Description of Artificial Sequence: Synthetic oligonucleotide
ccggcgggt

SEQ ID NO: 727 - DNA, 694 bp, Artificial Sequence
  Description of Artificial Sequence: Synthetic polynucleotide
gagtggtccagcaggcacgggcctgctggcgtgggtcgcagcacccatcactgacccggtgctggaggaggaaaccggcggagcagcttccccactctcagttgcgcgtctggcgatggcgatcagaggtcctgctgcgctctccgctgcgctctccctccattagccgcgctacgcggtgctgcgccctcgctggtgcctcgctcctggctcacaggatcggccccccacttccaggcacgacccccttccccggcccctcggcctttccccccactcagccatctccgacccggggcgcgcgttccccccggcccggatccttctctccctccggggacacccgctccctagccccggctcgaccctccccaaagcgcagcacggagtctcggcgtcccatggcgcaacccacagccttggcccagaagctggtgcggcccatccgcgccgtgtgccgcatcctgcaaattccggagtccgacccctccaacctgcggccctagagcgcccccgacgcccggggggaaagagagcgcgagagcgctgagcagaaagcgggagaacgccccgaagccggcccatggggagcgagtacccagcaccggctagcacgaccgccgcccacaccgcgcccggcctgtgaagcccaggacccccctccccgggagaggcccatgagggcaggagagtg

SEQ ID NO: 728 - DNA, 387 bp, Artificial Sequence
  Description of Artificial Sequence: Synthetic polynucleotide
atgaccgatgagcataaaagtaacattaacagtaacagcagtcactccagcaacaacaacaacaacggcagcagcagcaataacgacaacaacagcaacgacgacgcagcaagtagcagcaacagcaaaaacaacaacaccagcaacgagagcagccacagcaacaacaatactagtagcataattgcagaggcggccgccaagtttctactgaaaaatggcctaaacggcagtagcagcaccagctacccccctctgccaccgcctctgcccgccaacttaagcaggacgaccacgcccacgacaacgacaacgccctcatcctccagctccaccgcctcaaatggctttttgccgcatgccaagacgcccaaaagtagtagcatt

SEQ ID NO: 729 - DNA, 270 bp, Artificial Sequence
  Description of Artificial Sequence: Synthetic polynucleotide
taaaccccagttttatatcgtatatgctatctacaggtccactttacacttaataatataaaaatactactataaaggaaccagaaaaataaaaaagggtcattatttatttgagcagatcattatcaaacgcataggaagagaaaaaacacagttttattttttttccacacatatttattggtctcctagtacatcaaagagcattttaatgggttgctgatttgttttacctacattttctagtacaaaaaaaaaacaaaaaaagaa

SEQ ID NO: 730 - DNA, 185 bp, Artificial Sequence
  Description of Artificial Sequence: Synthetic polynucleotide
gggacgtgaaaattacagtagttactgttttttttggactataagatcgggggaaagataacacataagaaataaaacgactactagttagactgctctgcggaagaagcaaggaagtaaaggctgcattttatttttcttttctagtccaacataaacaggtgtatcaagagaaacttttttaa

SEQ ID NO: 731 - DNA, 60 bp, Artificial Sequence
  Description of Artificial Sequence: Synthetic oligonucleotide
cccttatatttactcaccttccccctactctaattctcctgatttcagaacaaaaaaaaa

SEQ ID NO: 732 - DNA, 176 bp, Artificial Sequence
  Description of Artificial Sequence: Synthetic polynucleotide
cccttaggatactttctgatttacatccgaagaattgggtgcgtcaattaaaggcaattcttcgctctatcaagcagttttactgcgtctgtctaaagaaacaattgttttactgaatttcaacaaagttctaactcgaggtgaccggaggccactgtaataataaaaaatagaag

SEQ ID NO: 733 - DNA, 167 bp, Artificial Sequence
  Description of Artificial Sequence: Synthetic polynucleotide
attgaaaaagtgaccattttttactcctgttcaagcgcatttgctttgataccattttgtttgccgaagacacggtgagttgacgttagtaagtcactgaggctataaaaaataaacacgaagacgtttatagacataaataaagaggaaacgcattccgtggtaga

SEQ ID NO: 734 - DNA, 194 bp, Artificial Sequence
  Description of Artificial Sequence: Synthetic polynucleotide
ggatccaaggcatattctgttacattgtacctgtaggatttactgagagctgaaaccattgaaaactattctgcaattaattatcttcgtacggactatcactacttttttttaagaaagacttatttctattgtttattgtttataattcactctgaatactcgcttattaattgtgtgataaattctaaagg

SEQ ID NO: 735 - DNA, 342 bp, Artificial Sequence
  Description of Artificial Sequence: Synthetic polynucleotide
ggcctctaacaatctggaatagaatgtcgatcaggcacgttcgtgtaaacattacgattttggaattccacttacataagatagcttctttgtaaaagccgttcgaagatttcgtttatagtgatgctttttctggagagatttaagataataaggatatgtggaaggaaatgaaaatgtacacctacaaagcgttgatggtatggaaactatcgaccatagtttgttaaacaggaaatatttgcttgagggtaaagtgttctgattcattatacaaagccccttgcttataagaaaagaaaccaaatcagaaaaggagattatttcaaggtaggcatcgaa

SEQ ID NO: 736 - DNA, 458 bp, Artificial Sequence
  Description of Artificial Sequence: Synthetic polynucleotide
cgccccctcacagaaacttatgggcagcttgctgccttaacggaattgactagaattggtttgatttttttttcttcctacttcttcttccatttccctcccctcttcctcatatatgtatacagaaaaatcatacccctataaattccttggccccaatcttctgtcagattttcctttataaaagagtctttgttttgtaattaaaagatacttttttctttcttcttctacgtctccttttttttttttaagaaaatttaacttataccactattttgttcgcaattgatcaagaaaaaatacaattgaaaaggttttacatttttaatttttctgctcatcgcgcttttttaaaaggataaataaacatttctttaaaaaacatcttcaataagaaaaatcggttaaaaaaacttttcttctcaaagcatacctaataacaatataatcccata

SEQ ID NO: 737 - DNA, 400 bp, Artificial Sequence
  Description of Artificial Sequence: Synthetic polynucleotide
gccctcttgtttttctttttcatttttttaaatcacacttttttttcttttcaagatttataaatcttccttccaggtttgagccggacccattgtttaattaaagcatagaaggcaacgaaggagtgggttatagaattagcattgcggcaaaaacgtcatatttattaatatttatttgcgaaggtcatattcaacgcaatcgcacgtcctcttccgtcttttttctagcttttgtccttttttatttgtctacatccctttctctacggtatccagaagaaggtgtgtgtgtgtgtgtgtgtgtgtgtctataaaaagcagtaagagtcaccaaaaaaaaaaaacgacaaacaagtgatccgaagtgtgacgaataaagcaaactctccaactcaaa

SEQ ID NO: 738 - DNA, 399 bp, Artificial Sequence
  Description of Artificial Sequence: Synthetic polynucleotide
tgacaaaaaataaaaaacgaaatccatcgtgaacagttttgtgtttttaaatcagttctaaacacgaaaagggttgatgaaaaacgcagaagaatccgaaaaactaactaaccgagcaaaaacttgacttgagtgttgtttgacaaatcaggaaagataaaaaacaaatcataagaaaaaactgcacgaaaaatgaaaaagtttctaatattcaaaatcttgcacaagaaatacaaaatcaattaaagtgaactctaaccaaaagttgtacacaaaataaaaagcaaaacaaagcagcgaagaacaatcacaagaagagcaaagtgccaacaaagtgcaggaaggaaggaagcggataaggacaaaaaggaagccagcacacacacacacacccacaca

SEQ ID NO: 739 - DNA, 318 bp, Artificial Sequence
  Description of Artificial Sequence: Synthetic polynucleotide
acagtcagtccactctgaaacctcgacgagagaacattgaataacaagcggaagcgaaaagcgcagttgaaagttcgtcaaaaagcgacaagtttcctcgttcgttttcccgccaaatgagtcagaaaaattttccaagtgctcgatacgaaacataaagacttacaagacttaaagtgcaagcagtgaatggaatatattattcctcagcgatattgaaatcaaacattaaaaatatatgctacactaaagttatatatttttttaaagattcatacgttttgtaaaatcacattttgtattaaattaaataccgcc

SEQ ID NO: 740 - DNA, 22 bp, Artificial Sequence
  Description of Artificial Sequence: Synthetic oligonucleotide
tttataatttcttcttccagaa

SEQ ID NO: 741 - DNA, 105 bp, Artificial Sequence
  Description of Artificial Sequence: Synthetic polynucleotide
acaggctcatctcgctttggatcgattggtttcgtaactggtgagggactgagggtctcggagtggattgatttgggattctgttcgaagatttgcggagggggg

SEQ ID NO: 742 - DNA, 1118 bp, Artificial Sequence
  Description of Artificial Sequence: Synthetic polynucleotide
cagtgtttcacgcgatttcgaaacgttgagatcgttgccgcggtcgccgtgaattggaattgtgagtgtgttcgtcgtgcggaaaatcatcgctgtcaaatagaggccacagtgaattgccgatacctaatactgtgcaaggcgaaattatgtgccccagcatttcgtgaatgaaaagtgcgaaaatacaaaatacagagcaatagtgcgaggtcggtggagttcgaattaaagaaattccacgaaatacaagtgcgggcgattctcgtgtgctggcgagagtgcggcttgtccgggtgtatcggcgacgactaaatgcatgattgagatcacgtgaaatgatcatcgagtgccgcgaaggtgtgaaagtaaaaatcatgtgaaaaatgtgagaaaaagtgtggaatgctatgtgacaacaaccacaaatactacttgcaaacaaaagatcaagagagcagcgaggagagcaacaacaacatcgagagaatcaagaaaaatgataacctaaataaatcaaattgctagtcagaaaaaacaaacaaacaaacaacaacaacaacagaaaccagggaactcaaagccacagaaagagagaggaaaattaagttatagaagtgatccgaattccgatcccgcgtgcattttctcccccaatctcaacctctctggtctacgggtttttcccgaatttacaattttcgggttttctcttgccaccgaagaaagctttcgccacaagctggaaagaaagtgccaaggcagcagtgaagaaaaatattatcgaaacgtgtttgaaatttataacaacaaggaaaagcgagggaaggtgtcattcattgttctcgaccaaggtgttctgcgtgaaaggaattgataataatctcactacaaagtgttcaatcaatgagttgcaacggcggaacaaatagaagaaaaattgcattccaactgaagtgaaatatttgttgcgcttttcggctgcaacagagtgtgagagcgggacgaaagatgattacctagcgggggtgagagagacccaaaaagcgaaagcagaactcgtggaaagctgaaaatttgaggaaacaatttcataatacgaatagaaacaccgcaat

SEQ ID NO: 743 - DNA, 207 bp, Artificial Sequence
  Description of Artificial Sequence: Synthetic polynucleotide
ggcgatccacttgcctctgcctccctagtgctgggattaaaggcgtgcgccaccacaacgcgtttagtccctttcataaagaccggaggaacagacgtttacggccagctcccgaaaccaagtgaactggaggccaccctgcaccaagggttggaaccttttcacaaaatccacgctcctaatacaaggcaactctgaaccagtgca

SEQ ID NO: 744 - DNA, 125 bp, Artificial Sequence
  Description of Artificial Sequence: Synthetic polynucleotide
aggagtggagtatatcaggcgggactcttgcgctccccctcgcactcgcgccttaggaagcttgggtgtgtgtggcgcgctgtcttcccgctcgcgtcagggacctgcccgactcagcggctgcc

SEQ ID NO: 745 - DNA, 784 bp, Artificial Sequence
  Description of Artificial Sequence: Synthetic polynucleotide
ctagaaagcagttaacgagtagtctgtgttttttcgcttgcggttaaaagccacgaggtcgttcatcgttcatcgttttccttttcaacttcaagcaaagcaaatataaaccaatgcaaaaaacgcagtgatcttttgaggcccaaatcgtttggggccgaacaccgttgattctaaaacgcaaatgtagaaacaaatcaagaaagtggaaaataaatatgtttcgctttcaaaacatgtgaatgtgccgaactcaaaactgaaacgtagaaggaacgcgttcgttttttacatacgacaatcgtataaaataagagaaaagctccaaaacgtattaaatagcgatgcttggatgatcttcgtagcagtcacgttgtacatacaaatacatacatatgtacctactatatggcacataaaatacgttacgcacactagtggcgaataaaaagcgaattggatttcgctcaaaacaacaacacaatcatatatactacccataaaaaaaaaacaaacccataaaaaagtgcaaagcaaccaggaaaataaagtaaaacagtgccagttaacaacagcaaacggcgatcaacaaatcccaccggcaaaatcaacaattttttaaatcgcaatcaacaaggagcaacaaattagccagctatttcccattgcaaacatttggcggattgattgcgaagctttcacattcgcttcgatatcttttgggctggcgaggattgcttgaagagccgcaaagctgcaactgcacaacgaacttttctacccc

SEQ ID NO: 746 - DNA, 174 bp, Artificial Sequence
  Description of Artificial Sequence: Synthetic polynucleotide
gaagtgataatcccaaaaaaaaaaacataacattagttcatagggttcgcgaaccacaagatattcacgcaaggcaattaaggctgattcgatgcacactcacattcttctcctaatacgataataaaactttccatgaaaaatatggaaaaatatatgaaaattgagaaatcc

SEQ ID NO: 747 - DNA, 489 bp, Artificial Sequence
  Description of Artificial Sequence: Synthetic polynucleotide
agagtgaaatattactgctgaggaaacgtagcagggcacacgtctctctttgcgtcctggtgcctcatttctccatcacctacttacttcctggttgcagcttctcttcctttgggacttttgcacccggagctccagattcattaccctgcttcactgcggagccttcaggagtggcatccggtgcactgcagagacccgactctccttgctaccttatagccagaactgctgcaggctgattcttcacacacacactctctgctcttcccatgcaaatcagatctcaggtgcctcagcgtcctacccttctggagggctgcagtatagccaccccaagaccttactgctcagtgcctggaatcctgattgcgaactccgggggtcactcgtctccctcacccattgcccagggggcgagagaggccatcacaacctccagtttgtgtcaaggtccagtttgaatgaccgctttcagctggtgaagac

SEQ ID NO: 748 - DNA, 212 bp, Artificial Sequence
  Description of Artificial Sequence: Synthetic polynucleotide
tttcggtttcacttccggtgaggggccgcgcctgagagggcgggcagtgaagcaaacggacggcgagcgcgggcggtggcagtgacggcggcgccgctgccggggggcgtgcggtaacgcggcggcggcggcggcggcgacggcggctgggcctcaagcgcctgcagcccacctcccggaggcgggctcccggcgcgaggacggacgagaag

SEQ ID NO: 749 - DNA, 384 bp, Artificial Sequence
  Description of Artificial Sequence: Synthetic polynucleotide
accgatgagcataaaagtaacattaacagtaacagcagtcactccagcaacaacaacaacaacggcagcagcagcaataacgacaacaacagcaacgacgacgcagcaagtagcagcaacagcaaaaacaacaacaccagcaacgagagcagccacagcaacaacaatactagtagcataattgcagaggcggccgccaagtttctactgaaaaatggcctaaacggcagtagcagcaccagctacccccctctgccaccgcctctgcccgccaacttaagcaggacgaccacgcccacgacaacgacaacgccctcatcctccagctccaccgcctcaaatggctttttgccgcatgccaagacgcccaaaagtagtagcatt

SEQ ID NO: 750 - DNA, 384 bp, Artificial Sequence; identical to SEQ ID NO: 749
  Description of Artificial Sequence: Synthetic polynucleotide

SEQ ID NO: 751 - DNA, 63 bp, Artificial Sequence
  Description of Artificial Sequence: Synthetic oligonucleotide
ccacaagtcgctgataattcaaacagaaatcatttaccaagctccgtgagaaccttttccaat

SEQ ID NO: 752 - DNA, 29 bp, Artificial Sequence
  Description of Artificial Sequence: Synthetic oligonucleotide
agtcagctccagcaatccagttcagcaac

SEQ ID NO: 753 - DNA, 188 bp, Artificial Sequence
  Description of Artificial Sequence: Synthetic polynucleotide
agcaatcgcctagcgaacagccaacggtgaacacatagcagccacacaagctctatagctgatacaagcaacgaaatacaaacaacgcagtttgtgtaaacaatcaaattgtcgcagccatatcgagtgtgcttacacgtccagcggaaagttttcgaaaccaatccaatcaatcagctaagatgtcc

SEQ ID NO: 754 - DNA, 239 bp, Artificial Sequence
  Description of Artificial Sequence: Synthetic polynucleotide
gcgagtcttgccattgggtagactgcccgcctttcctctgcaagtccctcctttcaccctccttcattgggaggggcagcagataaggggcggggactaggccgggcttgtggcgcgctgctccctcctccttacccccccctccctgtccggtccgggttcgcttgcctcgtcagcgtccgcgtttttcccggccccccccaacccccccggacaggacccccttgagctcgcccctc

SEQ ID NO: 755 - DNA, 303 bp, Artificial Sequence
  Description of Artificial Sequence: Synthetic polynucleotide
tcagcaggattgggtcagggcctgactaccaagccctgctggcatcatactgcctggggtaacatgggaggcagggccagggggattagaatctctgagccatcacatgctgtcagggggaatgcgggctacagcttcctcgcaggcaggagtctcaggttctcctcattcctgcacccagtaacagccccagtgtgaccagctctgtggtggggacacctggactccttcttacagttctggtgctaagggaccacttccaaagctggggaaccccagggaggggtcagtggccagataccc

SEQ ID NO: 756 - DNA, 249 bp, Artificial Sequence
  Description of Artificial Sequence: Synthetic polynucleotide
ctccagttctccccgcccaccctacagaaagtgtctcctgattggctttgaggccgcagggctcaggttacattcgcaagagttgcggagcgcgggagaccggacccaagaggagagaggctggttctgcaccgattctgtgctggtccgggagtgcccgacagcccctgaactaccacccagcattgtacaaacccacccccactctgagccaggctccaccccagccaaggaccctcaacaccggca

SEQ ID NO: 757 - DNA, 41 bp, Artificial Sequence
  Description of Artificial Sequence: Synthetic oligonucleotide
agtcccgagcctaaagcctcgcctgcctgcccagtgccagg

SEQ ID NO: 758 - DNA, 148 bp, Artificial Sequence
  Description of Artificial Sequence: Synthetic polynucleotide
gttattctccgaggggcccgacagcccccgggagctccaggatgaggagtccggcagctgcctctgggtgcagaagtccaagctgttggtgattgaagtgaagactatttcctgtcattatagccgtcgcgctgcttctcgacagtcc

SEQ ID NO: 759 - DNA, 102 bp, Artificial Sequence
  Description of Artificial Sequence: Synthetic polynucleotide
aaaagaaagaagccagaacataccaccagccctttgagtatacaacataacaaacgtcattactttacaacttgattaggagacagtacagagatctgaagg

SEQ ID NO: 760 - DNA, 216 bp, Artificial Sequence
  Description of Artificial Sequence: Synthetic polynucleotide
agtgctctggcgagtagtcctccctcagccgcagtctctgggcctcttcagcttgagcggcggcgagcctgccacactcgctaagctcctccggcaccgcgcacttgccactgccactgccgcttcgcgcccgctgcagccgccggctctgaatccttctggcttccgcctcagaggagttcttagcctgtcccgaaccgtaaccccggcgagcag

SEQ ID NO: 761 - DNA, 362 bp, Artificial Sequence
  Description of Artificial Sequence: Synthetic polynucleotide
gaattccggggcggcggccgcggggatcccgcgagcggcccctgaacatctacccttcttgccgggacccgggaggtccccactggcctccgggcccgtcctgatcagactcgtgtcgacctccccgtccacgcgcatccgggagagccgcgccacgagacggacccgggcccgccgggacccctggtgtctggccctgcgtcgagaggctggtgactgccacccataagctccagcttcagcctcggcttactcccctcaggggcttgcaggctgaggcctgccctcggacgcggctgaccagcctctccctctcttccacactttggacttctctttggacctcctaaaaaggctccatc

SEQ ID NO: 762 - DNA, 648 bp, Artificial Sequence
  Description of Artificial Sequence: Synthetic polynucleotide
agagagtggaggggaccaggatggcagcataggagccaaccatcaagcagcagtctctggactagaaatccaagagcataaaacgctcctccgagctgccgcttctgctcctgcctgcgctcaccctctggtgggagccgagagcggtgggagcacacggcttagctgggctttccaattcctgcaggcgacgcccatggtcctggacggcaccttcaagacaacttagggaggtctactctctccagttccaaaagaaagtttggacaaagtgaatttggggtgcatttgggagatggcagctgctccctctgcttcctctgtgtcacctctcagaagcccctgcctccaacccactccaaccttcccacactgacacccagctcccagtccctctttttctttctttggtccctgagcctctctggggtcagggatgttggtcctgttcccttctcctttcattgtcctttccatctgtctgctgagctgtctcacctgtttctaccttcaccccatcgtcacccctcacctcccttctctccacctctaaacctttctctctcattccattttatctatcaaagttcttacttgcacccatacctccatccaccttcccctccttctctccctgaaattctaact

SEQ ID NO: 763 - DNA, 234 bp, Artificial Sequence
  Description of Artificial Sequence: Synthetic polynucleotide
gatctgcctgtaacgtgggggtggggcaggcaggggattagaaatctctgagatcaacatcacaagtgtctgggcttttctggtcctgaggctgtggacagctcccggagtggtggctctgtggggggaacattagagctcctgtaacacaggagtcctggtgtggagggaccctccttgtcacataggccccttctgaagctggcgaccccctgggtggcagccgcacccagg

SEQ ID NO: 764 - DNA, 300 bp, Artificial Sequence
  Description of Artificial Sequence: Synthetic polynucleotide
ggaagatatgaccacctcctgattatttttgcagcgggaaactttgaaatatttttcattgctttctcccatactaagattgtgtgtgaggcagtgagggagtcccttgacttactcaagtcatttcattggattttaattacaactgatcatgtgattgtttttttccatgtaaagtttggggcttcaaactttgcttctggagaatgccttttgcaacacttttcagtagctgcctggaaacaactgcttagtcatcggtagacatttaaaatattcaaaatgtatggagaatgggga

SEQ ID NO: 765 - DNA, 404 bp, Artificial Sequence
  Description of Artificial Sequence: Synthetic polynucleotide
gtttctcctccgcggccagctcgggcagcccgagtctcctctgtcgcccgcacctgcgcgtcgcggtcgtcccgccctcggcggcggctcacctgggcgcagcgcgggcagggcgccgcctccgggacgcaggtggagcgggcagggcgcgggcaccatgagcagcggcgccaacatcacctatgccagccgcaagcggcgcaagccggtgcagaaaacagtaaagcccatccccgctgaaggaattaagtcaaatccttctaagcgacacagagaccggctgaacacagagttagaccgcctggccagcctgctgcccttcccgcaagatgttattaataagctggacaaactctctgttcttaggctcagcgtcagctacctgagggccaagagcttctttg

SEQ ID NO: 766 - DNA, 183 bp, Artificial Sequence
  Description of Artificial Sequence: Synthetic polynucleotide
ggaggagccccaggagtgaagaaatttggagtctacgtgcgctcggaactgtgtcgtgattaaattagtcagccctcagagacaggcgtcctacctcctttatccagacctcaaaagccccgttgtgcacccgtggtggcttcttcaccttccctgtttcgtcctccactgtatggcccagac

SEQ ID NO: 767 - DNA, 193 bp, Artificial Sequence
  Description of Artificial Sequence: Synthetic polynucleotide
gcggagcttctgggttgcgggccgaaacggcaagcggatggagggcgctcgaacggccaggtgtcgtgattaaattagtcagccctcagagacaggcgtcctacctcctttatccagacctcaaaagccccgttgtgcacccgtggtggcttcttcaccttccctgtttcgtcctccactgtatggcccagac

SEQ ID NO: 768 - DNA, 1015 bp, Artificial Sequence
  Description of Artificial Sequence: Synthetic polynucleotide
ctgaagttaacaacgaaaaattaacgccagtcggagcagcctgaggctctcccgcttctcagctttagcgtcgtcagaccgagaagtggttcccggtcctgagggtgaagtggggagccgaggacgcaggcggcgatgtcctaggcggggacctcctccctacagcttcgggcgccgagcgagcgcagcggcgcttctagcggccggcgggcggcggcagcggctgcgatccgcaggctccagatctgtcgccccgagatccgctctccccccgcccccacttacctcccggcaccttgaaacgcgaggggggcccggggcactttgcaaagagcaggagggacgaggctgcgagctagacggcggcgaaggagagggcgagaggagaagccggggaaaggaaggactcggcggccggaggactcggagcgcgctgccggcgcggggagcgcgcagcggcctcggaggaggaggcggaggaggcggcgcgggcaagcgacggcgccgcgagctgggcagccgcgctctgcttggcggtggcggacagcgaggagccacacgcaccgccgagatggactgctgaacctgcggggctccactaccgtactggaacccggagcggggcgccagcgcacccaggacacggtgccccaaggggcccctactgcaagctgttaacttcaagtcccttgcggcggctgggccaaacacgcccccgcgtcccgctcgtagcagccaccgccagggactcccaagcctcccggtggagatccgcgcctctcgggtgtccccacccgctaccccgactctgtccggtctccagtcgccggccccccagcagactccgcccggcacacggcttcctcgaacttgatttctcacctcctctgtcccgtcacctccatcctctttccgcccccgtctcgcctccaccccctcgatttcctcctcctcgccccccatttccaccctcctccccctcccccggccacttcgctaacttgtggctgttgtg

SEQ ID NO: 769 - DNA, 204 bp, Artificial Sequence
  Description of Artificial Sequence: Synthetic polynucleotide
atgcttcattcgcctcacaaacaaccacagaaccacaagtgcggtgcaaactttctccaggaagactgcaagaaggctctggcgtttaaatggttaatctctgcaggtcactaccagccaccgagaccaaccgagtcatttaaggctgcaagcagtatttacaacagagggcacaagttctatctggaaaaaaaaggagggact

SEQ ID NO: 770 - DNA, 259 bp, Artificial Sequence
  Description of Artificial Sequence: Synthetic polynucleotide
aaatggctgcatcctgccaggttaaggaataagagaagatgatgcggagccatccattccacaggccagggtcggtgcaaagcatttagggaacccacagcgcggccggcgcgctcccttcccacgcagggctctctctgtggcgcaaacggcaggagaaagatccatcagagctacacttgtgtctgcaggctgtctacacttctctcttggcagaaaccccatcaggagagctttggaaccatccacccctaaatag

SEQ ID NO: 771 - DNA, 344 bp, Artificial Sequence
  Description of Artificial Sequence: Synthetic polynucleotide
ccctgaggtgcgcaccgatatcgatattcgtgccggtttagcggttctgcgacccaaagagtccagggagatccaccgagtggtgcctggcgtataggactatgcagccgccttgtggctcggagcagcggcccgcgatgtcccagccactgtgaaccatttggtcagcgccaacctgctcagccccagcaccgacaggctcagcctctggtacgctccactccgcgggaggccaccagcaccaagcagcaagagggcgcagggaaggcctcccccctccggcgggggacgcctggctcagcgtagggacacgcactccgactgactggcactggcagctcggg

SEQ ID NO: 772 - DNA, 93 bp, Artificial Sequence
  Description of Artificial Sequence: Synthetic oligonucleotide
tcgccatattgtgcggcggcgccggcggttgattctcgagtctcgctccggccactgccagcgcacccccgggctggggcaggagccgaaatg

SEQ ID NO: 773 - DNA, 87 bp, Artificial Sequence
  Description of Artificial Sequence: Synthetic oligonucleotide
agcttgcttttcaacattattatgatggcatgtgataaagtaaattatttaatttatttttgatcttgttgacttacgagttcagga

SEQ ID NO: 774 - DNA, 100 bp, Artificial Sequence
  Description of Artificial Sequence: Synthetic polynucleotide
ttatagtcacgggatctcacgtgattatatatcatgtgctctacgtaggaaaaaaaattcatggtagcagctctgtgaggtgcatggtagcaggttcaaa

SEQ ID NO: 775 - DNA, 174 bp, Artificial Sequence
  Description of Artificial Sequence: Synthetic polynucleotide
attgacggatttctcggctaggatgatggagcctgatgacggtgcggactcttccttcattattaacgtaggggtctcccagaatcgctgaaaacgggagcgcggcagccgcgacagtaccagttgagagtcgattcggtcggttaacatcgtaagcatcgtggcggtggtgtg

SEQ ID NO: 776 - DNA, 174 bp, Artificial Sequence
  Description of Artificial Sequence: Synthetic polynucleotide
aatttaaatatgttaataatgctgaagacaagtatttcgattattaacctctatatttctatataaagtatctgtgagtctcagtggacatcacagtaaggtcgcagttaacttgtaatcttttcattcctgtgtcggagcagtggtaatggagccggacgatttcgccaaaac

SEQ ID NO: 777 - DNA, 174 bp, Artificial Sequence
  Description of Artificial Sequence: Synthetic polynucleotide
ttgcctctctcaacaaaaagccaccgacattaagagagagagtattgctgcttagttaactgcaggccctatttagggttaccgcccaggatctgcaacagcattcctgtatcatccagggcaccggtggacttggtgaggattgagttgacctcatcattagagaccagactc

SEQ ID NO: 778 - DNA, 174 bp, Artificial Sequence
  Description of Artificial Sequence: Synthetic polynucleotide
actctcccccaccgcccacagagggccactcacgcatccccagtgggttttgcggaccctctcttctctcccgggccgcccctatcgctcgacctctccacacctgcaccacccccgccgtccgaacccaggcctaattgtccgcgcatccgaccctagcgtgttcgtggaacc

SEQ ID NO: 779 - DNA, 174 bp, Artificial Sequence
  Description of Artificial Sequence: Synthetic polynucleotide
aatcgtgtttaactttagacgcagaaggcaattcagcagcccagcgtttttggggagaacgatcctcatgcaaaaaaccacttgtacgatggaaagatccacttaccaatctgtggtatgggcctgaccctgtattaatatggggacgagggcatgtttgtgtttttccacagg

SEQ ID NO: 780 - DNA, 190 bp, Artificial Sequence
  Description of Artificial Sequence: Synthetic polynucleotide
ccaacaatgtgatcttgcttgcggaggcaaaatttgcacagtataaaatctgcaagtagtgctattgttggaatcaccgtacctatttaggtttacgctccaagatcggtggatagcagccctatcaatatctaggagaactgtgctatgtttagaagattaggtagtctctaaacagaacaatttacct

SEQ ID NO: 781 - DNA, 174 bp, Artificial Sequence
  Description of Artificial Sequence: Synthetic polynucleotide
tattttctgggcctgatgtacctatagagcatgcacctacacaggttttcccatttcctttggcccctacaacgccacaagtgtctatttttgttgatgggggtgatttttatttgcaccctagttattatatgttaaaacgtcgacgtaaacgtgtatcatatttttttacag

SEQ ID NO: 782 - DNA, 174 bp, Artificial Sequence
  Description of Artificial Sequence: Synthetic polynucleotide
tttggagagttcgtcctcgcagccccgctcgggcggcatcggaactctccagttcgtggaggagtttactccctctgtctacttcaaccccttctccggctctcctggccagtacccagacgagttcataccgaacttcgacgcaatcagcgagtcagtggatggctatgattg

SEQ ID NO: 783 - DNA, 174 bp, Artificial Sequence
  Description of Artificial Sequence: Synthetic polynucleotide
gggtagtggctcgcgcccgtagtctggagaagcatcgccagggttgagtcgcggcagaacccggttcgcggacggccgcggcgagcgggacttggtcaccccgccgatttaaagacccacagccagccgacttctccagttacgggagcgagcccccttttttctttttgccag

SEQ ID NO: 784 - DNA, 174 bp, Artificial Sequence
  Description of Artificial Sequence: Synthetic polynucleotide
ttaaaatcagttagcaaatttctgtccagtttattcagcagcacctccttgccctcctcccagctctggtattgcagcttcctcctggctgcaaactttctccacaatctaaatggaatgtcagtttcctcctgttcctgtccatccgcacccactatcttcatgttgttgcag

SEQ ID NO: 785 - DNA, 174 bp, Artificial Sequence
  Description of Artificial Sequence: Synthetic polynucleotide
tagccatgctccagcccagcgttggtttccttctgttcatcctgtgggggttctagacgagccggctcttccaagcccaggtcctgcttgattttgggttgctcgtgggtggttaagttctcctcctcctgctcctgcttacgcggctgctcctccatcttcccctaggaaaca

SEQ ID NO: 786 - DNA, 174 bp, Artificial Sequence
  Description of Artificial Sequence: Synthetic polynucleotide
aggaacaatctttaatgtatttacacagtagaatacagtgttttaattttcctaacaaaatgcctattttagatgatggtagtcctatgtatacatttactgacggtacttggaaatcttttttccaaaagcttggcagacaattagaattaacagatcctgaagaggaaaaca

SEQ ID NO: 787 - DNA, 174 bp, Artificial Sequence
  Description of Artificial Sequence: Synthetic polynucleotide
ggcctcactccacaggcctatgctgtgatatctggggctcctgctgctatagctggatttgcagctttactgcaaactgtgactggtgtgagcgctgttgctcaagtggggtatagattttttagtgactgggatcacaaagtttctactgttggtttatatcaacaaccagga

SEQ ID NO: 788 - DNA, 174 bp, Artificial Sequence
  Description of Artificial Sequence: Synthetic polynucleotide
tttccagaactacaggcacagatcgcgctaaacgagtttcctcgtcgcgagacacttcagcggtcagatcacaggaatctataaaaactggaatcgaccgtgcacaagtggaaccaaaacatgaattaactattaaagtttcacaattaccggtgtgctgcataacgccgaaac

SEQ ID NO: 789 - DNA, 174 bp, Artificial Sequence
  Description of Artificial Sequence: Synthetic polynucleotide
ctgatctcttgttagatctttttgtaatctaaactttataaaaacatccactccctgtaatctatgcttgtgggcgtagatttttcatagtggtgtttatattcatttctgctgttaacagctttcagccagggacgtgttgtatcctaggcagtggcccgcccataggtcaca

SEQ ID NO: 790 - DNA, 174 bp, Artificial Sequence
  Description of Artificial Sequence: Synthetic polynucleotide
tctattcaggtcccgatgtagtgttgcccacaggaccccctacatggccttatgcacctcaatctccttttgataccacccatgatgtagttatacagggctccacatttgcgttatggcctgtttattttttgaaacgtaggcgtcgtaaacgtattccctattttcttgcag

SEQ ID NO: 791 - DNA, 174 bp, Artificial Sequence
  Description of Artificial Sequence: Synthetic polynucleotide
cccggacgcctccgctgccggtcgctccaagggcccccccgggaaggcgggtctgtggaccgtagggcccttaaatttttagagcagcccccgcgtcggcctgtctccccgccgtgcgtggccttacaaatctgcaagtgccccaaatcggacacgggcctgtaatataccaac

SEQ ID NO: 792 - DNA, 174 bp, Artificial Sequence
  Description of Artificial Sequence: Synthetic polynucleotide
ttgtagtttttaaatcctgttttgtaccattgtatatgtgttatgaatgagatgttctaaaggatgggcaagtagccaatgattcttaattcttaaagcgtgtgattcagtatctgtttttataatacggagagctatcgtgctgagcggaacagagctttggctgtgacgaag

SEQ ID NO: 793 - DNA, 174 bp, Artificial Sequence
  Description of Artificial Sequence: Synthetic polynucleotide
acgcgaggctgaacctcctgaatcactgcatctttcttgaggcgtttaaagaagagaatagtggccagggcctcggtggggtccagcgtgaggtcttatttttgaaaagggatattataaaacaggtcattgctcggattgtggcagccgatagcaccctagatctagtgaatc

SEQ ID NO: 794 - DNA, 174 bp, Artificial Sequence
  Description of Artificial Sequence: Synthetic polynucleotide
gcctcgaactggcttttcagattgtccacggtccagggcacaaagtcctccatctttggagttctgcccgcgatctgtgccacctctgttacgccactcctcgtgagggggcagctggacagtctttttccggtcagggggtttggctcgtttgcgctcgtgactttgtgagcc

SEQ ID NO: 795 - DNA, 174 bp, Artificial Sequence
  Description of Artificial Sequence: Synthetic polynucleotide
tgatagtttgattgatataagagcgagagtggcctccaccggtcaataccccgaggtgtgtgacattcatccagctactggattagacgaatgcgaagctgaggaaatagtcagggttgggaaccttttgtcatacctttaggtcctcttttatcctcctttatagggaacctc

SEQ ID NO: 796 - DNA, 174 bp, Artificial Sequence
  Description of Artificial Sequence: Synthetic polynucleotide
acaactccgactgtccgctggtggccatcgtcgagagcggccccgacggctgcatcggaccccgctcggtcgtggtttacgaccgagacgttttttccatcctctactcggtcctgcagcacctcgcccccagactagcgggcggcgggagcgacgcgcccccgtaggcccgcc

SEQ ID NO: 797 - DNA, 174 bp, Artificial Sequence
  Description of Artificial Sequence: Synthetic polynucleotide
catacgcaggggctggacgtggttaccggtcactggactcggtttcgctgtagctgtggttcaacctgaacatggctcccagagctgctaggaaccggtccagtcacattttttggtgggtggggggtactaaaaaagtatttaatattggggtttaatgataaaatccaggtt

SEQ ID NO: 798 - DNA, 174 bp, Artificial Sequence
  Description of Artificial Sequence: Synthetic polynucleotide
ttgctctcatgcttataattataattttgatcatctttatcttcagaagagaccttctctgtccacttggagccctttgtatactcctactgatgagtaagtattacaccctttgccccacaccccctttcccttactcttccttctctaacgcactttctcctctttccccag

SEQ ID NO: 799 - DNA, 174 bp, Artificial Sequence
  Description of Artificial Sequence: Synthetic polynucleotide
tcggttatcttatgtctgattcttattctacacatcttcaatgttcgatatgggggtacgaagccctgaattttacaccgattccagcacttttttgcgttgcttaaaaacagtaatttagtcggcacacgtacaatattaaactaggcttcttctaattgcgcagtgtttaaa

SEQ ID NO: 800 - DNA, 174 bp, Artificial Sequence
  Description of Artificial Sequence: Synthetic polynucleotide
aaacatatgtaaatgacagtagagatgttagaagacaaccaatcaggtataggcacgcccaattacaaagacacgaaattggtcaaatacttttaaatgatctgcaacaattgctttccattataactatttcagatttagagaaggatccatattctgtatttcgggtgtaac

SEQ ID NO: 801 - DNA, 174 bp, Artificial Sequence
  Description of Artificial Sequence: Synthetic polynucleotide
aagacataggactaaccgctttgggggacaacattgaaaatgaattgcaggaaatagatttattaactgcggatggtgaagaagaccaggagggcagagacctgcagttggtattttccactggcaatgatgaggtggttgatattatgactatacctatacgtgcaggcgggg

SEQ ID NO: 802 - DNA, 174 bp, Artificial Sequence
  Description of Artificial Sequence: Synthetic polynucleotide
cacccacaccggaggtgagctccgaggtcctcagtcatctgggatttattacggtccctgggaggtggtggggttaatagctttaggcttagtagcgggtgggcttttggctctttgctacctatacctcccttgcttttcctacttagtggtgctttgttgctggtttaagaa

SEQ ID NO: 803 - DNA, 174 bp, Artificial Sequence
  Description of Artificial Sequence: Synthetic polynucleotide
acaataaaatattcggtaacaatgatctctggagacttaccaggagtttggacagctcaatgacagtgtccatctcgtcgcttgtcagctttctgtgtgggtaaaaaaaggactattaaacattgagtcttggcgaagacgagcagttttgtttttgagtttgttttctaaaag

SEQ ID NO: 804 - DNA, 174 bp, Artificial Sequence
  Description of Artificial Sequence: Synthetic polynucleotide
gacattgcagtttcttccccttcctcttctgaaacatcgaacgatgagtgatttcgcccatgtaacaagaactgggatgaaccctggggcaacagactgcggggaggaggggggcagtgataagtcatgacaattttagatgaggtagaaattttgcatattttcagacccacc

SEQ ID NO: 805 - DNA, 174 bp, Artificial Sequence
  Description of Artificial Sequence: Synthetic polynucleotide
ggttttgttgtcgttttggaatgtcccatgtcggagatgtcgttaccggtgtttgctttacttgtgcacgaataagaaaacagagtttggagttttggaagttaatggataacatcaagtttccattgcgttcctcgtgcattttaggccagaaaatcgaccacaaaatcgaga

SEQ ID NO: 806 - DNA, 174 bp, Artificial Sequence
  Description of Artificial Sequence: Synthetic polynucleotide
ctgtaccctctacatctttatcaggttatattcctgcaaatacaacaattccttttggtggtgcatacaatattcctttagtatcaggtcctgatatacccattaatataactgaccaagctccttcattaattcctatagttccagggtctccacaatatacaattattgctg

SEQ ID NO: 807 - DNA, 174 bp, Artificial Sequence
  Description of Artificial Sequence: Synthetic polynucleotide
tgtagcgtcccctgctattgttcccggggggcttctggctaagcagtttggtgataatatgaaagagtatttacaactagaacttagagaagaacttagagccaagggcatgtcaattgatgatgccattcttaatttgctacaggtgacacaggagcaagatattttgacatt

SEQ ID NO: 808 - DNA, 174 bp, Artificial Sequence
  Description of Artificial Sequence: Synthetic polynucleotide
tctcctgaccacgcttagccctggctctgaattgtcagctgtagtggcccaggacttaagtgactttttgcagctgacacttagacgccagctaagggctgagggcagaaccttattaaattttgttgttttaaacacgctgcaggtggtggagcagcaggatctgtttctatt

SEQ ID NO: 809 - DNA, 174 bp, Artificial Sequence
  Description of Artificial Sequence: Synthetic polynucleotide
tctatctaataatagttgccaacaattattagacatagagacgtgacaaccgactacggtgcatataaaagagctgatcagcacagatttgaaggagactgatggagcctcagagagctaaaaatttggtggactattgcaagcaacaacagattagtttttttgaattagagc

SEQ ID NO: 810 - DNA, 174 bp, Artificial Sequence
  Description of Artificial Sequence: Synthetic polynucleotide
acagactttcccgttagtggtttcctctcctcagggaggtcgtccatatccgtgctggttgtggaggtgcttgattcgtcgtccgagctccccaagtcccacctgcctcccctagtcacagaggccttttctccgccgcgccccaccgagtccgctccaaaaccgccttctgcc

SEQ ID NO: 811 - DNA, 174 bp, Artificial Sequence
  Description of Artificial Sequence: Synthetic polynucleotide
gtcatggccaaatttctagatttgcatgaaatattgaaggatgcttaatacatggggaaaataaacgcattaataagtcgtcagggggtggatcactccaaactcctcctatatcccacgataaatggtctaaatacttcacgcgtgtgccttggtttgcaaccttagatcaat

SEQ ID NO: 812 - DNA, 174 bp, Artificial Sequence
  Description of Artificial Sequence: Synthetic polynucleotide
cttcatccacaaacagaagattaaaatcttgacctcggataccctggaacgatagaaagatatatagttaccccaccaaagtttaaatgtatccttaaataccacgtacgtaaaaaatgtttgaatacgtacatatttcttttttttttccagtacaaccatatccggtgtata

SEQ ID NO: 813 - DNA, 212 bp, Artificial Sequence
  Description of Artificial Sequence: Synthetic polynucleotide
tagcaccacccgatcgtaaactccatgtattggttacccatctgcatcgaaaactctccgaacactaggtgcagtaaggctttcatggagtggtttgctatttagcgtacgtgtaccataggcagccccaaaaacacgtgtgaggagaaagtcccagtcactttgggcaaagtagacagccgcgcttgcgtggtgggacttaattaatgcct

SEQ ID NO: 814 - DNA, 174 bp, Artificial Sequence
  Description of Artificial Sequence: Synthetic polynucleotide
attctctatggcctcctagcaaggacaacatcgtaacgttctccattgcttattgcttgtgcgcttgccttcttactgctttactgtgcgtatgcatacacctgcttgtaaccactcgcatcaaaaacgccaataacaaagaaaaaatgccttaacctctttctgtttacagac

SEQ ID NO: 815 - DNA, 174 bp, Artificial Sequence
  Description of Artificial Sequence: Synthetic polynucleotide
tcagtcgcggttagtgacgtactcggacccttttcccttaaagagcctgacgggtgtgcgcgagtacatccagatttgagcgtcgagcggaggacgcggaataaaacgtgtcgcacaaagaactctctttctctgcttcttttctggggtgtctagctggcggcctcttttgac

SEQ ID NO: 816 - DNA, 174 bp, Artificial Sequence
  Description of Artificial Sequence: Synthetic polynucleotide
atcaaatccatatttgtaagttatgtttaacccctcccctttttgtcattatctccgccctcttataatcggatcactttataagtgtgtcggtgagtatattttgtacagttgttggacaacaggtttttggttcattaacactatcaacataagtcggggtatacaagtata

SEQ ID NO: 817 - DNA, 590 bp, Artificial Sequence
  Description of Artificial Sequence: Synthetic polynucleotide
taattcctgcaggttcagggttcttaaatctgtttctctataagaacactcatttttcacgctttctgtcttctttcttccagggctctccccttgccctaggctctggccgttgcgcccggcggggtcaactccatgattagcatggagctgtaggagtctaaattggggacacagatgtttggaacgtcaccttgcagtgttaacttggctttcatgaatctctttgatcttccacaaggggtaggctacgggtgaaacctcttaggctaatacttctatgaagagatgccttggatagggtaacagcggcggatattggtgagttgttaagacaaaaaccattcaacgccggaggactgactctcatccagtggatgcattgagtggattgactgtcagggctgtctttaggcttaattccagacctctctgtgcttagggcaaacatcatttggccttaaatgggattctgtgagaggggatccctccattgacagctggactgttctttggggccttatgtggtgtttgcctctgaggtactcaggggcatttaggtttttcctcattcttaaataataatgaac

SEQ ID NO: 818 - DNA, 174 bp, Artificial Sequence
  Description of Artificial Sequence: Synthetic polynucleotide
ttcttgacttttttctttggaggtaaaggcacagcttccagttcttcttcgctttcggaatccagaaagtatctgcccatttttggcggcggcggctgagcgctgcggtctggggtgcgctccctctgtgagtgctgattgctggccattatttaatcctaggcaaagaaacac

SEQ ID NO: 819 - DNA, 174 bp, Artificial Sequence
  Description of Artificial Sequence: Synthetic polynucleotide
tttgcgaaaaacacccagggcgtgtgtgtttttttttggcggggtttttacaccttccgtcattacgtcagtgtaagttgcctttaagtactcagctaggtcagtaagtagttagttactgctgttggcgcttgtactgctgtgctctttgtctactggtaagcgggctaagct

SEQ ID NO: 820 - DNA, 174 bp, Artificial Sequence
  Description of Artificial Sequence: Synthetic polynucleotide
gacttctgtttttagtccaattataataaaggattgtttatgcgtgcagacgacaatttctacaactcagatgctgccaggtacaaagagctcagcgatatttccggtatatgaccttcgtaagctgctcagtgcacttgtcatttcggaaggtagcgtcagattcgatatata

SEQ ID NO: 821 - DNA, 174 bp, Artificial Sequence
  Description of Artificial Sequence: Synthetic polynucleotide
aagcttacttgctatctgatttgattggtagacctttgagtgaaatcgcaattcgctgtgaaaattgtatgtgtttgttggattatattgaaaagtacgattgtatttgtcacggtggttattttcatttagttagaggtaattggaggggctgttgtagaaattgttacgaac

SEQ ID NO: 822 - DNA, 174 bp, Artificial Sequence
  Description of Artificial Sequence: Synthetic polynucleotide
tctgacgcataataattgttggcaacaatcgtgcataataacttaggaaccgagacagtatcatataaatactgctgaacagtagatttcttcagaagctgatggagccacaatttcctactgatttggattcatactgcaaatattttaacataagcttttttgacttagttc

SEQ ID NO: 823 - DNA, 174 bp, Artificial Sequence
  Description of Artificial Sequence: Synthetic polynucleotide
aaaattgttttaaaaagggccctaagactattgaaatagtgtatgatggcaatcctgaaaatacaatgttatacactatttggacacatatatattttgaagatgacgaaggcaactggcaaaagactgagggacatttggactatcatggtgcctattttatggatggattaa

SEQ ID NO: 824 - DNA, 174 bp, Artificial Sequence
  Description of Artificial Sequence: Synthetic polynucleotide
gaaaatttgtaagacgctgaactttgtctcgatctagccacgcaaacgggatcgactgcgctttcaaatccatcttttagaaaacaaactcaaaaacaaaactgctcgtcttcgccaagactcaatgtttaatagtcctttttttacccacacagaaagctgacaagcgacgag

SEQ ID NO: 825 - DNA, 232 bp, Artificial Sequence
  Description of Artificial Sequence: Synthetic polynucleotide
gcctccaggaccccccctcccgggagagccatagtggtctgcggaaccggtgagtacaccggaattgccaggacgaccgggtcctttcttggataaacccgctcaatgcctggagatttgggcgtgcccccgcaagactgctagccgagtagtgttgggtcgcgaaaggccttgtggtactgcctgatagggtgcttgcgagtgccccgggaggtctcgtagaccgtgcacc

SEQ ID NO: 826 - DNA, 174 bp, Artificial Sequence
  Description of Artificial Sequence: Synthetic polynucleotide
tcggaatccaaaggacgcagaccacctttggttacggacccctttctcccccccttccgaacaaaaagcagcgggcggggggccggggtgagggagggacacgggggacacggcgcgggggtcccgcctcacgccccgcgccctctaaatcccccccgttgctttgtcaagcag

SEQ ID NO: 827 - DNA, 174 bp, Artificial Sequence
  Description of Artificial Sequence: Synthetic polynucleotide
gtggccccctaccaaggaaaacatggttgggttttctttggcttttgtgatcatggcctgctttatgtcaggtctgctggtaggagctctagtgtggttcctgaaacgcaagcccaggtatggaaatgaggagaaggaaaaattgctataaattctttttcttttcacagcacc

SEQ ID NO: 828 - DNA, 174 bp, Artificial Sequence
  Description of Artificial Sequence: Synthetic polynucleotide
tataattacttttttacatgtgtcccaatccctgttaaaagtatatatattatatgtgtgtgtgttttatattcctatggcactggtacattaccatgctaccttgcaagtaacataaatattttcatatatatacaataaatttattgtttgtgtaccagtgtgtagtttacc

SEQ ID NO: 829 - DNA, 174 bp, Artificial Sequence
  Description of Artificial Sequence: Synthetic polynucleotide
atgataaatataagtttttgtacagtagaattgcaatatttgaatttaaacataagttcccattcaaagaggatggtacccctgtatttcaacttactgaccaaagctggaaatctttttttgaaaggctttggacacaattagagctcagtgacccagaagacgaggcagaca

SEQ ID NO: 830 - DNA, 174 bp, Artificial Sequence
  Description of Artificial Sequence: Synthetic polynucleotide
gacctcctcctcctcatcatcgagggtagaggtggtggtagctggactgggtggtggggtggttaagctctcctcctcgtcgctgctgggggcgaggtgtgatggcgcttgcagcgatgttggcagtgatggctgagtttccatgtctgttgtttctctgcctaggagaacaca

SEQ ID NO: 831 - DNA, 174 bp, Artificial Sequence
  Description of Artificial Sequence: Synthetic polynucleotide
ccatgcgcaggcgcctgagtggcgggttcctgcctgcgcttatccccataatcgccgcggccattggcacgatcccgggcatagcttccgttgcgctgcaagcgtcgcagcgccgttaatgtgcaaataaagcctctttagactctgacacacctggtcctgtatatttttaga

SEQ ID NO: 832 - DNA, 235 bp, Artificial Sequence
  Description of Artificial Sequence: Synthetic polynucleotide
ctctaaggtgtttctggaaattgacaaccgccagtgtgttcaagattcagaccagtgtttcaagaacacggatgcagcagcagctcttctggcctctcacgccatccaggggaccttgtcctaccctcttgtgtccgtcgtcagtgaatctctgactcgaaaaggtactcagcttctctatctacttgctgttgccgttgtcattatcctgtttattatcttgctgggagttatc

SEQ ID NO: 833 - DNA, 174 bp, Artificial Sequence
  Description of Artificial Sequence: Synthetic polynucleotide
ccgtcgtgccaaggttcgactggacaacgtcacccagacacactccgggggggaggcccaaatctatctcttgccgccagcgctctggacagccttccagagggtcaccgaggcgcttgtaagcgtggttgccgcgtccaaaaaggtttataccgcaacacgtccaggtgtacc

SEQ ID NO: 834 - DNA, 174 bp, Artificial Sequence
  Description of Artificial Sequence: Synthetic polynucleotide
tagacaatcctgaccgggcaataggactgcattgcatatccttaggtggtattgagaaacctctgccacccaccggcgtggatctctatggggggggccccatagactgggtctatactgcctgatagggtcgcggctggtcgaccactgactgtataaccagttgtactcaac

SEQ ID NO: 835 - DNA, 174 bp, Artificial Sequence
  Description of Artificial Sequence: Synthetic polynucleotide
cacgtagccgcccgcagcacgcggatcttacggcctgcgtcatcacccagggcacgatcctcgcccaattgcacgccatccaaaaatcccgccaagagtttcttctgaaaaagggtaaaggggtctacctggacccccagacgggcgaagtgcttaacccgggtctcccccagc

SEQ ID NO: 836 - DNA, 174 bp, Artificial Sequence
  Description of Artificial Sequence: Synthetic polynucleotide
agttgatcctgccagcggtgggtcgctactgtttcgcgaaccagtcgttttgacagttggttgggatcaaatttgttctgtgcgcgtcacgccactttttgtggcgggaatgtgcgaaaataacaggaaaaagaaccctggaaagggttcaaagaagaaaaagaatgctggaag

SEQ ID NO: 837 - DNA, 174 bp, Artificial Sequence
  Description of Artificial Sequence: Synthetic polynucleotide
ttatgcgggtgatttattgaacggctttttttgtttagtcgtgtgttgcatgtattttggtgtgtgattagacaatttatcgtgcttgttttggtggacaccaataaaattttttgcagtattaatgtttttcaaatttgtgtttatttgctctgagccgggcagttcatcgtt

SEQ ID NO: 838 - DNA, 174 bp, Artificial Sequence
  Description of Artificial Sequence: Synthetic polynucleotide
tctcctctgtagtttctttacaactgtatgcgcgccttaattttagttggaataagtatactgatgatcttcccgaatatccaaacccccaggatgatttacccctaaatattgtatttccagagcccccgcgtcctccttctgttgttagctattttaagttcaccggtgaag

SEQ ID NO: 839 - DNA, 174 bp, Artificial Sequence
  Description of Artificial Sequence: Synthetic polynucleotide
gcataggtagagctcgcatgctgcttagctttgtttcagaagatcagagggaaaaatttatcaatgttatgaaattacctaagggtgttgattggtcctttggtagctttgatagtctttaactactaacatttcatttttttatactaataactaacccactttatatattgt

SEQ ID NO: 840 - DNA, 174 bp, Artificial Sequence
  Description of Artificial Sequence: Synthetic polynucleotide
agtacccggaaactgccaaggcaataagtgccctgcagctgtgtttatttaatgtgacgtcatgtaataaaattatgtcagctgctgagtgttttattacttcttgggtggggacttggatatataagtaggagcagatctgtgtggttagctcacagcaacctgctgccatcc

SEQ ID NO: 841 - DNA, 174 bp, Artificial Sequence
  Description of Artificial Sequence: Synthetic polynucleotide
atgtacaaagcggtgatgatgatacatggaccaaggtgtctggccatgtggaccatgcaggactatactttacacacgaagggacacgtgtaacctatgttaggtttgcacaggaagcacagacatatgggaacactggcacctgggaggtgcatgtgggaggacagctaattt

SEQ ID NO: 842 - DNA, 174 bp, Artificial Sequence
  Description of Artificial Sequence: Synthetic polynucleotide
attgttatttagtagaataaacatctttttatataacaaaaacacaaagtacatgactttagaaagccaactaaatgcattattatttaaaaattacagaatcaacgagtaatgtcactatagttttttaaagtaacttttaattgttcacttctagttgtaatcaaaagaagg

SEQ ID NO: 843 - DNA, 174 bp, Artificial Sequence
  Description of Artificial Sequence: Synthetic polynucleotide
cgagccacagcccctagccgtagacgaggtccatcacgccgtagacgtcgacgcaaagccactttagccccagcggcagtacgtcgcgttgtacaaagggggcgcacactaatacttccatccgtgcgttaccaccctagcattctctaacaagctgcgctgccgttttttcag

SEQ ID NO: 844 - DNA, 174 bp, Artificial Sequence
  Description of Artificial Sequence: Synthetic polynucleotide
cttcgggagacggaggcaaaactggaacgcgatccggcacttgaacattcttgcgcaacttctttttgggaggaagtgacggggcccgttctggactcgtctcctgcaagtagggagtgatggtggggagttcttgctgacggccggccatgctttactcctaggcgagaaaat

SEQ ID NO: 845 - DNA, 174 bp, Artificial Sequence
  Description of Artificial Sequence: Synthetic polynucleotide
acggcggctcttggattcggcattggtgcgccgcgtcttggcctgcatgatcatcgtcatcatgatcgccattagcatctggatcctgacctacgtgctgtttctctaataagaaccccggcccctgacggtaattttcctttcttctccgtttctcctcagctgccgtacgtg

SEQ ID NO: 846 - DNA, 174 bp, Artificial Sequence
  Description of Artificial Sequence: Synthetic polynucleotide
tatatgtattgtatacacagtgtatgtagacacatgtagtgggtttgtgggtgtcatacatttattgggtgtggggtattcattatagtggtgtggtttggtgttttgtttttggctttttgtatggtttgtatttttcatttttttacattatattgctaaataaattttagt

SEQ ID NO: 847 - DNA, 174 bp, Artificial Sequence
  Description of Artificial Sequence: Synthetic polynucleotide
cggtgagtgtcttcccgtactgggggaggcccaaggcgggtacgccctggtctgtagcatgtatctgcacgttatcgtctccatctattcgacaaaaacggtgtacaacagtatgctatttaaatgcacaaagaataaaaagtacgactgcattgccaagcgggtgcggacaaa

SEQ ID NO: 848 - DNA, 174 bp, Artificial Sequence
  Description of Artificial Sequence: Synthetic polynucleotide
actgtcggtggtgctttttaatcacggtgaccagtttttttacggtcacgccggcatggccgtagtccgtcttatgcttataagggttgtttttcctgttgtaagacaggcttctaatgtttaaatgtttttttttgttattttattttgtgtttaatgcaggaacccgcagac

SEQ ID NO: 849 - DNA, 174 bp, Artificial Sequence
  Description of Artificial Sequence: Synthetic polynucleotide
ggagctcttataatttttatttgttcagaaaaggttttaaaatgaaccattgaagcatcttgcaaatacactgaaacgttttgtgcaaagtggcaatccaacaaattttgtccaaaccattccaaaaataattgatcattttgaagctgagtttccatttgacagatccccaca

SEQ ID NO: 850 - DNA, 174 bp, Artificial Sequence
  Description of Artificial Sequence: Synthetic polynucleotide
tggactgaccgcttttttgggggcgcccggggaggcggcggcgacggggacggggacgacacgtcctccatggttgggggacgtcgcgccgcaccgcgtccgcgctcgggggtggtttcgcgctgctcctcttcccgactggccatttccttctcctataggcagaaaaagatc

SEQ ID NO: 851 - DNA, 174 bp, Artificial Sequence
  Description of Artificial Sequence: Synthetic polynucleotide
cgcttatgtttgtttgccttattattatgtggcttatttgttgcctaaagcgcagacgcgccagaccccccatctataggcctatcattgtgctcaacccacacaatgaaaaaattcatagattggacggtctgaaaccatgttctcttcttttacagtatgattaaatgagac

SEQ ID NO: 852 - DNA, 174 bp, Artificial Sequence
  Description of Artificial Sequence: Synthetic polynucleotide
cgatgactcggcagacgacagcagcgtcctggatttgggagggagtggcaacccgtttgcgcaccttcgccccaggctggggagaatgttttaaaaaaaaaaaagcatgatgcaaaataaaaaactcaccaaggccatggcaccgagcgttggttttcttgtattccccttagt

SEQ ID NO: 853 - DNA, 174 bp, Artificial Sequence
  Description of Artificial Sequence: Synthetic polynucleotide
ggccgacactcgcgatggcctcggttccagggctgtaatcactttaacctagccaacgactatttgactcgccaccggcgtgagactgtggactggggcctgttggagcagtaaaggcaataactcgtgtgctttgtaaatttccgcccctagcggtcaaccccgtacaaggcc

SEQ ID NO: 854 - DNA, 174 bp, Artificial Sequence
  Description of Artificial Sequence: Synthetic polynucleotide
acggaaaacagcggaaagtattatttcaaacgagaagatgtgaattccaccttttattactcttgttacaacctgaccgtgacctaaacgcatgtaaagttccacagagccgcgtggctgtagctattgtgtttacgttgcttttgaaatgttaagcgtccctacggcgctaac

SEQ ID NO: 855 - DNA, 174 bp, Artificial Sequence
  Description of Artificial Sequence: Synthetic polynucleotide
agtttagtgatgcactgccacttctcatcaaaattgtccataaatttcaagtttttcaccatgtcagcaatctgatcggctctgacgtaggtggaaggatacttgtaagtttcatactcataatctatcagtctgttccacactacgcagtccgaagagggatgtagtccttta

SEQ ID NO: 856 - DNA, 174 bp, Artificial Sequence
  Description of Artificial Sequence: Synthetic polynucleotide
agcgatggcttacttgaaatctaaaagtatgtctctggtgtagttgtttagcaatacctcggtcccctcctcccagctctggtactccagtccccggcgggcggcgaacttcctccacaccttgaaagggatgtcaaattcctggtccacaattttcattgtcttccctctcag

SEQ ID NO: 857 - DNA, 174 bp, Artificial Sequence
  Description of Artificial Sequence: Synthetic polynucleotide
aaccagggacgtttggcctgctgcagcttcctttatacaaggagtaggtaacttcttatctaatactgcccaggggatattcggctcagcggtaagcctcctattctatgcaaaacctattttgataggaataggagttatactgcttattgcccttctttttaagataatatc

SEQ ID NO: 858 - DNA, 174 bp, Artificial Sequence
  Description of Artificial Sequence: Synthetic polynucleotide
acattatgcgattagatgaattcaaatatctgcaaaccagaacaatgtatgtgtactttaacaagccatttcctcttaaaggaaatgggcaaccgttatattacattgatggttatacatggaactctttttttaggaaattttggcgtcacctaaatctaaaagaccctgagg

SEQ ID NO: 859 - DNA, 422 bp, Artificial Sequence
  Description of Artificial Sequence: Synthetic polynucleotide
tagtggttagcctaccaccccttggccactaattcttggctttctgttttgggatccaccatatcttggaggtggtgctgaaatattgcaagccacatggtatctgtgtgttttctaaacatgaagctttggttcagtggttttggacaaggaaaggctagtgtttggtctgggtacaaacccttgttgtgaaacggattaccggtagtagcatctagtggttccagtccataacatgagtgtatggtctagagtggacatagcttggatacagacaccttcagtattactgggtgttccagactagttcctgaggtaccaagttatgaggggctatgggaaaacccctttgatccacactgcctgatagggtcgcggctggtcgagtcccatacactataaaaccagttgactttcatgca

SEQ ID NO: 860 - DNA, 174 bp, Artificial Sequence
  Description of Artificial Sequence: Synthetic polynucleotide
gaaaccctaaacgttcctgctctcacagatcacgggaccctgccgctgcgcagcagtatccggggagtccagcgcgtgaccgttactgacgccagacgccgcacctgcccctacgtctacaaggccctgggcatagtcgcgccgcgcgtcctctcgagccgcaccttctaaaaa

SEQ ID NO: 861 - DNA, 174 bp, Artificial Sequence
  Description of Artificial Sequence: Synthetic polynucleotide
cagacaagcaccccacccatcccagaaaccgcacggccgagaatcgatccccagcattcaaaatgcgttattaagaaaaaacatatgatgaagattaaaaccttcatcaacattgcacagactttgatccttaggagtttattctagctatctacaaaacgggtccaaaacgga

SEQ ID NO: 862 - DNA, 174 bp, Artificial Sequence
  Description of Artificial Sequence: Synthetic polynucleotide
cgaacactgccccgatccagtgttaatttggggcagaggttcagtctgtgtttactctcaaacctatgatgccgctagatggctaccagaacggttagtaagacaggtgtctaacaataaccaatccagggagtgattctctccctgagatcgctctttcccttgttcacagat

SEQ ID NO: 863 - DNA, 174 bp, Artificial Sequence
  Description of Artificial Sequence: Synthetic polynucleotide
cacagtttacctgctttacggatttgtcacccttatcctcatctgcagcctcgtcactgtagtcatcgccttcattcagttcattgactgggtttgtgtgcgcattgcgtacctcaggcaccatccgcaatacagagacaggactatagctgatcttctcagaattctttaatt

SEQ ID NO: 864 - DNA, 174 bp, Artificial Sequence
  Description of Artificial Sequence: Synthetic polynucleotide
gtggatcccatggacgagcccacccttctttatgttttgtttgaagtctttgacgtggtccgtgtgcaccagccgcaccgcggcgtcatcgagaccgtgtacctgcgcacgcccttctcggccggcaacgccacaacataaaagaagcaagcaacatcaacaacagctgccgcc

SEQ ID NO: 865 - DNA, 174 bp, Artificial Sequence
  Description of Artificial Sequence: Synthetic polynucleotide
tgtggcttgcccttctcttgttcctggtggtcctatggctaaaaatttcggagaagatatgaatgagtacatacagttactgctaagggaggagcttagggattgcggcagagcaattgatattccacttgttaatctactacaggtgaaccaggagcagaatctgttggaatt

SEQ ID NO: 866 - DNA, 174 bp, Artificial Sequence
  Description of Artificial Sequence: Synthetic polynucleotide
taacctgtaaattagatgatggtgatacatggatggcattatggatgttacttacatttataactgtattgttactgttattggcgtttcattgtaggacattatatgtatacaaatatagtaagtaaaatactgtgtattaaataaatatttttatatttgcagcgccttgtt

SEQ ID NO: 867 - DNA, 174 bp, Artificial Sequence
  Description of Artificial Sequence: Synthetic polynucleotide
tgtttgtgttatatagacatcttggtgtattgtaacataatatgtggtagcctgtacggatcccacatagggggttgtatatcatatgttgttgttgtgtgtaccctagtgtgctattgtggcaccattctttttctatttttgtttttttttttacagttaaataaagcaacc

SEQ ID NO: 868 - DNA, 174 bp, Artificial Sequence
  Description of Artificial Sequence: Synthetic polynucleotide
accaaaagtacaaatatttgcacagcagagttaaatcctttgctttcaataacaaatttccacttgatgctaatcacaaaccacaatttgaacttactgaccaaagctggaaatctttttttaaaaggctttggacacagttagatctgagtgatcaagaagacgagggagagg

SEQ ID NO: 869 - DNA, 174 bp, Artificial Sequence
  Description of Artificial Sequence: Synthetic polynucleotide
taattctaattgctgtccttggctctagcatgatcctagtgagcatcttcattataatcaagaaaacaaagaaaccaacgggagcacctccagagctgagtggtgtcacaaacaatggcttcataccacacagttagttaattaaaaataaaataaaatttgggacaaatcata

SEQ ID NO: 870 - DNA, 174 bp, Artificial Sequence
  Description of Artificial Sequence: Synthetic polynucleotide
acttgaaatcagcaatacagtctttgtcaaaactttctaccagcagcacctcaccctcttcccaactctggtactctaaacgtcggagggtggcatactttctccacactttgaaagggatgtcaaattttatttcctcttctttgcccacaatcttcatttctttatccccag

SEQ ID NO: 871 - DNA, 174 bp, Artificial Sequence
  Description of Artificial Sequence: Synthetic polynucleotide
agcagcaggacgagcaagctttaagcccttatagaattgtgacagattgtgggcagtgtcacaaaaccttagcattacatgtactagctacggacggggcaataaggtctgtggaacaactgctgtgtggagacctggaattggtgtgtgcaagctgcataagagcccagcgcc

SEQ ID NO: 872 - DNA, 174 bp, Artificial Sequence
  Description of Artificial Sequence: Synthetic polynucleotide
gggacattgcagtttcttccccttcctcttctgaaacatcgaatgatgagtgatttcaaccacgtaacaagaactgggatgaaccctcgggcagtatcagactgcggggaggggcagtgataagtcatgacaattttagatgaggtagacattttgcatattttcagacccacc

SEQ ID NO: 873 - DNA, 174 bp, Artificial Sequence
  Description of Artificial Sequence: Synthetic polynucleotide
tggtcaacatcaaaggttatatcaaggcgcggaacggccttatcaaaacactcgcctccgcggatgcaacccgggtggtgtttgtgcaagaacccgggtgtctttgatctcgggatcctgctgacgtaagcgaccctttgcggtttcggtctccccacctccaccgcacacccc

SEQ ID NO: 874 - DNA, 174 bp, Artificial Sequence
  Description of Artificial Sequence: Synthetic polynucleotide
actgtttgctgacgatgcgaaaagatatggtacaactggagaatgggaagtaaaagttaataaggaaactgtgtttgctcctgtcaccagctccacgcctccagggtcgccaggaggacaagcagacacaaacaccacccccgcgacccccaccacctccacaaccgccgttga

SEQ ID NO: 875 - DNA, 174 bp, Artificial Sequence
  Description of Artificial Sequence: Synthetic polynucleotide
ttgtataagtgatttaggatttaccccagaagtgaaataattcttagaataaaagaccgactagaatatccttaaggctgtctaacgtgccacacagctagggttagcctgacatctggaacaagatcgatactaatatagggatttgtttcatactagctctctgcaaacaca

SEQ ID NO: 876 - DNA, 174 bp, Artificial Sequence
  Description of Artificial Sequence: Synthetic polynucleotide
gaatacggatttgtctccggagtgggtcaagagtttcgattttcgggagcactttgtgtaggcggcgcgtcccaccccctgggccaccagccgcgattcgtctgacgctgctcctatattaagctttcgcgcagcgcgctttatccgactcgctgtcgagacggctttgccggc

SEQ ID NO: 877 - DNA, 174 bp, Artificial Sequence
  Description of Artificial Sequence: Synthetic polynucleotide
gaggcttcctgcccgcgctgatccccatcatcgccgcggcgatcggggcgatccccggcattgcttccgtggcggtgcaggcctctcagcgccactgagacacacacttggaaattgtaataaacccgaatggactctgacgctcctggtcctgtgatgtgtttttgtagacag

SEQ ID NO: 878 - DNA, 174 bp, Artificial Sequence
  Description of Artificial Sequence: Synthetic polynucleotide
ataacgtcgggaatgtgtcagttcaacgctgtcttttttccctaacagtcgtagtatccttaacgcgatcgtagacgtttatgcgagactgccggtaacgctgtcgttatcgttatattttttatttttgttttccatttttaattttatctcggattccgcacagaaaataaa

SEQ ID NO: 879 - DNA, 174 bp, Artificial Sequence
  Description of Artificial Sequence: Synthetic polynucleotide
gagtaaacaggagcatagttgttcttcatcgatgaagtgtgaaacggttctgctattctttgaaagttgaacactttttgatctttccatattaaatagattacaaaaatgatgtgtaatggaactcggaattgtttctaaattctccgtgtcttttttttcccgtgaaataac

SEQ ID NO: 880 - DNA, 174 bp, Artificial Sequence
  Description of Artificial Sequence: Synthetic polynucleotide
acctacatgactagcatcaagcaaactaatttctttgagcaagagagttccgattacaccatgctggtggtagatgacctttgagtcagggtggctacttgctcaggtttctgggcataaattctcctgcctgcctctgctctggtacgttggcttctgctgctgcttgtgatc

SEQ ID NO: 881 - DNA, 174 bp, Artificial Sequence
  Description of Artificial Sequence: Synthetic polynucleotide
ctttgacgcggcgctccgcccaagcgccgcggagttgctgcgcctgccgctatttcaccctaagtgaccccgctccccccggggggcgtggaggggggggctggttggatgtttttgcacaaaaagacgcggccctcgggctttggtgtttttggcaccttgccgcccggcgtc

SEQ ID NO: 882 - DNA, 174 bp, Artificial Sequence
  Description of Artificial Sequence: Synthetic polynucleotide
aatgtagacagctactgtggcaatcgtggtgggagtgattgcgggctttgtaactctaatcattgtttttatttgctacatctgctgccgcaagcgtccaagggcatacaattatatggtagacccactactcagcttctcctactaaaactcagtcattcttatttcagaacc

SEQ ID NO: 883 - DNA, 174 bp, Artificial Sequence
  Description of Artificial Sequence: Synthetic polynucleotide
ccgcaggtcacatgtgttaggtttcacagattctatatattactaactctatactcgtaattaacattagataagtagattaagaaaaaagcctgaggaagattaagaaaaactgcttattgggtctttccgtgttttagatgaagcagttgaaattcttcctcttgatattaa

SEQ ID NO: 884 - DNA, 174 bp, Artificial Sequence
  Description of Artificial Sequence: Synthetic polynucleotide
cgtggacgcggccctcggttgggcgacgcatgccagcccaacaaaatccgccggggtgccagtcccattcccgaaggcgtagcccgttaacttggctggcttggatggggagtagggccttttccattaccccaaggacctagcgcgcgggagtcgtggctttggggcgcatcc

SEQ ID NO: 885 - DNA, 174 bp, Artificial Sequence
  Description of Artificial Sequence: Synthetic polynucleotide
aatttcataaagatgttgaatggtttccggaattggtcgaagatataaataggatcttggtagatgcttggggcaggaaacctaaaatcgtgctgaacgcgtctttctttataaagtggctctcgtcgacaataagcagattgaagctctgtccgcgtatactctgagagggga

SEQ ID NO: 886 - DNA, 174 bp, Artificial Sequence
  Description of Artificial Sequence: Synthetic polynucleotide
ggctacgccttagcccaacaataccatcatctgtacggtcacccctcagaggaaagccttagaaaggtgttgaccaaacgatttgtgtgggaagatatgggacaacattgtaaggaaataactaacacctgtctaacctgtgcaaaatataaagttctcagagcaggaccacca

SEQ ID NO: 887 - DNA, 174 bp, Artificial Sequence
  Description of Artificial Sequence: Synthetic polynucleotide
cctttgtcggaggggtacgtggtcctcttaggagacgggaggtccaagccctcgccgcctccatctgaatttttgctttcggtttttcgccgaaaccgcgccgcgcgtcttgtctgtctcagtattgttttgttatttgtctgttcgttattgttttggaccgcttctaaaaac

SEQ ID NO: 888 - DNA, 252 bp, Artificial Sequence
  Description of Artificial Sequence: Synthetic polynucleotide
gtgcgctgttggttcctgccaacgtcattccgcaggatacccactcgggtggggtagttcctcagctggcaagcatattgggatgcgatgtttccgttctacaggcggcagtggaacagatcctaacatctgtttcggactttgatctgcgcattctggacagctattaagcttgtgattttgtttagggcggaaaaataaattttcctttgtttttccacatcggtgccttcacatatacaagccggcacc

SEQ ID NO: 889 - DNA, 174 bp, Artificial Sequence
  Description of Artificial Sequence: Synthetic polynucleotide
taccagagacgtttggcctgcagcagctagagctcttcaaggcataggtaacgttttgtctaatactgcccagggaatatttggaactacagtaagcattttgtcttatgcaaagcctatcctgataggaataggtgttatacttttgattgcctttttatttaagattgtatc

SEQ ID NO: 890 - DNA, 174 bp, Artificial Sequence
  Description of Artificial Sequence: Synthetic polynucleotide
gtttcttccctccgtaggacccaaatagcggggaggcacgtagggtggcgccgctgccatcacggtttcgtaagagggaggtggtgtctcaggaaaagccactgtctgcagttccaccgcgcgcctcatttcacagctaacggaagaaggaaaataagacgaacactggtcgcc

SEQ ID NO: 891 - DNA, 174 bp, Artificial Sequence
  Description of Artificial Sequence: Synthetic polynucleotide
tggcagattcccaaactaatgaaagttgccatgcaacccgtctcgctcagagatcccgagtacgactaggcttttttttttgtctttcggttccaactctttccccgccccatcacctcgcctatactatgtgtatgatgtctcataataaagctttctttctcagtctgcaac

SEQ ID NO: 892 - DNA, 174 bp, Artificial Sequence
  Description of Artificial Sequence: Synthetic polynucleotide
gtcacaaacataaaattctgtgtaggcgtttcgatcattctcaacctagcgctcggggctgccgaactacacactgaaaacgcagtttttaccgcttcggaaaaaatctccttatcctgctctgtgagattcgccgccgcctgatagaccgccgccaacgtaaggtcgggctcc

SEQ ID NO: 893 - DNA, 174 bp, Artificial Sequence
  Description of Artificial Sequence: Synthetic polynucleotide
aacatgattgcaaatatcaatatttacagagtagagtgacagtgtttgaatttccaaatccatttccatttgacagcaacggaaatgctgtgtatgaattaagtgatgcaaattggaactccttttttaaaaggttggcgtccagtttagagctgcagacaacagaggacgagg

SEQ ID NO: 894 - DNA, 213 bp, Artificial Sequence
  Description of Artificial Sequence: Synthetic polynucleotide
tttgggaatcgcaacacaacatggttacccatagattgaggaaatttccaataaactcagtattaaggcttgttgtgttggacaaggtgccctatttagggtgaggagccttactggcagccccagtgaatcctccattggataggaacagctatattgggtagttgtagcagttgtattcaaatgaatgcagcgttccgaaatatcatacct

SEQ ID NO: 895 - DNA, 174 bp, Artificial Sequence
  Description of Artificial Sequence: Synthetic polynucleotide
actctgttgaaactgccaaggcaatgagtgccctgcagctgtgtttatttaatgtgacgtcatgtaataaaattatgtcagctgctgagtgttttattacttcttgggtggggacttggatatataagtaggagcagatctgtgtggttagctcacagcaacctgctgccatcc

SEQ ID NO: 896 - DNA, 174 bp, Artificial Sequence
  Description of Artificial Sequence: Synthetic polynucleotide
tttgtttttggatgtgcgcgtggaggctttgttggaagccaccgttgagcaccttgaaaatcgcatttcttttgatttagctgtgctttttcaccaacacagtgggggcgatagatgccatctgcgcgatctacaatttgaagtactgcgagatcgtttggaataaaaattaac

SEQ ID NO: 897 - DNA, 174 bp, Artificial Sequence
  Description of Artificial Sequence: Synthetic polynucleotide
atttgtacatgcggaggaaagcgtgtgagtcaaaacggaggctgaaatttaataaagtttgtcacaccactctgtttttttgcaatttcctgtcatgtgacggcgtctcgtatccaggtcttatatttcagatacctcattgtttcacttctagtgttattcggagttttcaag

SEQ ID NO: 898 - DNA, 174 bp, Artificial Sequence
  Description of Artificial Sequence: Synthetic polynucleotide
ttattcttgaatggctgcttatggtgacaatcatagattgttatcataaagcgagttggattggccatccagtgtgaatcagattaattactcccttgtttgttggatccactcccgaaacgttttactccttaacttattgaaattgtttgaagacaggatttcagtgtcaca

SEQ ID NO: 899 - DNA, 174 bp, Artificial Sequence
  Description of Artificial Sequence: Synthetic polynucleotide
gcgggaaagttgtaaataaagcttctgcggttgtgacatcacaggagagtataaagcagttctatgaaaaagagaagtcattactgtccggtgtgaagttttggagactaagtgaaagacattgtcggtttgcgcttgtcggcatctgttttcttttagccttgtatttttgtt

SEQ ID NO: 900 - DNA, 174 bp, Artificial Sequence
  Description of Artificial Sequence: Synthetic polynucleotide
atgttaatgtaacaactgatgaatctctattttatttgagaagtagacttacgtgtttcaattttccgaataagttaccaatgtctgacaaagatgaacctttgtttaccatttctgacaaaagctggacctgtttttttagaaagttttggaatcaattagaacttcaagaag

SEQ ID NO: 901 - DNA, 174 bp, Artificial Sequence
  Description of Artificial Sequence: Synthetic polynucleotide
cttcaacaatcagcattatcgctgcagtgacaattggaatatctattcttgtttttaccataacctactacgcctgctgctatagaaaagacaaacataaaggtgatccattacttagatttgatatttaatttgttctttttttttttatttacagtatggtgaacaccaatc

SEQ ID NO: 902 - DNA, 174 bp, Artificial Sequence
  Description of Artificial Sequence: Synthetic polynucleotide
ccaacaacgcccaatgaaaaaaacattccaaattcaatgattgcaattattgcggcggtggcattgggaatggcactaataataatatgcatgttcctatatgcttgttgctataaaaagtttcaacataaacaggatccactactaaattttaacatttaattttttatacag

SEQ ID NO: 903 - DNA, 174 bp, Artificial Sequence
  Description of Artificial Sequence: Synthetic polynucleotide
gttaacaactatcaggcgattctctagttctaacacgaacgtttacggtcgttgccagctttttccttataaaactctggtgggaatttctcttgggacagatggacctgacatctgtacattcggttcgggatctgagttctgctctccgtatcccatttattgatttggttg

SEQ ID NO: 904 - DNA, 174 bp, Artificial Sequence
  Description of Artificial Sequence: Synthetic polynucleotide
ccataaggtgtaaacctgtgattgcgtgtgtggttaacgcctttgtttgctgaatgagttgatgtaagtttaataaagggtgagataatgtttaacttgcatggcgtgttaaatggggcggggcttaaagggtatataatgcgccgtgggctaatcttggttacatctgacctc

SEQ ID NO: 905 - DNA, 174 bp, Artificial Sequence
  Description of Artificial Sequence: Synthetic polynucleotide
tacgaaagcccaagcctggatgttgactccattatcccccggacaccagatgttttacacgaggatctcttaaatttctaactcccgttattgaaaccacgcctgcttcacgcctcgtttactaatggaatattaataaatatcttcctgttggctctctttgaagtggttgcc

SEQ ID NO: 906 - DNA, 174 bp, Artificial Sequence
  Description of Artificial Sequence: Synthetic polynucleotide
cgtgtcgatcccggggcctgtgtaatataatctcccaaacgtgggagggtgtcagtattggggtccgtgaaggctcgtccctgtcgtccttttagttgaactgatctaaagacccaccagtaaagaggttgtttgtttcccattgtgatagtcattgtgtattattcgtttcta

SEQ ID NO: 907 - DNA, 174 bp, Artificial Sequence
  Description of Artificial Sequence: Synthetic polynucleotide
taaggcagccagccaggcaccatacagcttctacgactgcaaagaagagagctggcacgtggggctcttccagatcaaacacggacctggaggggtctgtacaccaccttgccacgtagcgattagggccgaccgccacgaggaacccatgcaatcgtgactgtccgagcacat

SEQ ID NO: 908 - DNA, 174 bp, Artificial Sequence
  Description of Artificial Sequence: Synthetic polynucleotide
cttttgtttatcgaaatcagagctgtggctcttttagaagctgttgttgaacatttggaaaatcgcttacaatttgatctggctgtgatctttcaccagcacagcggaggcgatcgctgccacctgcgagatttacgcattcaaatccttgctgaccgtcttgattaagttttt

SEQ ID NO: 909 - DNA, 579 bp, Artificial Sequence
  Description of Artificial Sequence: Synthetic polynucleotide
gataaaagaacctataatcccttcgcacaccgcgtcacaccgcgctatatgctgctcattaggaattacggctccttttttgtggatacaatctcttgtatacgatatacttattgttaatttcattgacctttacgcaatcctgcgtaaatgctggtatagggtgtacttcggatttccgagcctatattggttttgaaaggacctttaagtccctactatactacattgtactagcgtaggccacgtaggcccgtaagatattataactattttattatattttattcaccccccacattaatcccagttaaagctttataactataagtaagccgtgccgaaacgttaatcggtcgctagttgcgtaacaactgttagtttaattttccaaaatttatttttcacaatttttagttaagattttagcttgccttaagcagtctttatatcttctgtatattattttaaagtttataggagcaaagttcgctttactcgcaatagctattttatttattttaggaatattatcacctcgtaattatttaattataacattagctttatctatttata

SEQ ID NO: 910 - DNA, 174 bp, Artificial Sequence
  Description of Artificial Sequence: Synthetic polynucleotide
ttccacagccgctcccaatacaattcctaaatcaacaattggcatcattactgccgtggtagtgggattaatgattatatttttgtgtataatgtactacgcctgctgctatagaaaacatgaacaaaaaggtgatgcattactaaattttgatatttaattttttatagaatt

SEQ ID NO: 911 - DNA, 174 bp, Artificial Sequence
  Description of Artificial Sequence: Synthetic polynucleotide
cgcgtgttattgtaggttcgttgccagatggcaagtgctgtcaacagcagacgttgtgggcggtcggtgtatttttgtgggttgcggtgagagtcggcactcggtgttttgtgagtgatctcaacagtttgtgttgcttttagcagcgtccaaaacagcgacgcgactttgggg

SEQ ID NO: 912 - DNA, 170 bp, Artificial Sequence
  Description of Artificial Sequence: Synthetic polynucleotide
gccgctgctgcaattgaagtgcaacttgcatctgttgctactgttgaaggcctaacaacctctgaggcaattgctgctataggcctcactccacaggcctatgctgtgatatctggggctcctgctgctatagctggatttgcagctttactgcaaactgtgactggtgt

SEQ ID NO: 913 - DNA, 174 bp, Artificial Sequence
  Description of Artificial Sequence: Synthetic polynucleotide
ttgcagagcagctcttcggagcctcgctcgggaggcatcggaaccctccagttcgtggaggagtttgtgccctcggtctacttcaaccccttctcgggatcgccaggcctctacccggacgagttcataccgaacttcgacgcagtgagagaagcggtggacggctacgactga

SEQ ID NO: 914 - DNA, 174 bp, Artificial Sequence
  Description of Artificial Sequence: Synthetic polynucleotide
aacacagtttaacacatacagtaagcacagtaatctttttaggaataattggcttcagcattttgattattatagcagcctttatttatctgtgctggcatagaaaatctttgtgtgtttctaaaacagaacctcttatgccgattccttactagttttcttttttcttacagt

SEQ ID NO: 915 - DNA, 174 bp, Artificial Sequence
  Description of Artificial Sequence: Synthetic polynucleotide
aggagaagtattagaagttctaactcgtattcctttgagttctctttctgtacgctgttttgattgccttacattgttatcttttgcagaaaaaatagattgtataattagtggtcaaaacttttatcttgtaaggggtcgctggagatcatattgtagaaattgcattgagaa

SEQ ID NO: 916 - DNA, 174 bp, Artificial Sequence
  Description of Artificial Sequence: Synthetic polynucleotide
gtgtctcaatttgcatcttaatatacaatggagccagcaaaaccctctggaaacaacatgggatccaatgatgaacgtatgcaagagtaagtatgattagtcattattagatctatcttatttaagattatttgggaatttttctaagtacttaaaaaatatttatacttacag

SEQ ID NO: 917 - DNA, 174 bp, Artificial Sequence
  Description of Artificial Sequence: Synthetic polynucleotide
ggacgttctcgggggcagaggtggaggcgattgcgaagggctggggtccgacctggaaggcggatgactggcagaaccccttccgcgttcgggggtgtgctccctgtggcggtcgcttaactgatttccttcgcggctggccattgtgttctcctaggcagagaaacaacagac

SEQ ID NO: 918 - DNA, 174 bp, Artificial Sequence
  Description of Artificial Sequence: Synthetic polynucleotide
ttttaaataatagtaaacttaccagacgtcagccaatcagaggaggtcttgcgtctctacagtcgtccgagtatggagaaaaacttttacatgaccttagagcgttgttcttgatcacttcttctgcagatctggataaagatacatcatctctctttcagatgtgatatagta

SEQ ID NO: 919 - DNA, 174 bp, Artificial Sequence
  Description of Artificial Sequence: Synthetic polynucleotide
gcatgatgaacaagggatgtcagcaagctacacaaagtatagatatttgtgcctaatgcaaaaagctatatttacacatttcaagagagggtgcacttgctggggggaggacatgggccgggaaggattggaagaccaaggacctccccctcctccccctccaggtctagtcta

SEQ ID NO: 920 - DNA, 174 bp, Artificial Sequence
  Description of Artificial Sequence: Synthetic polynucleotide
tctaggttttcagagctttctaaattggagatttcgttttctatgttcgtggggctggtggctgttgtcgtctcggaaggaattggtggttggggagtgaggtagcaatataacagaatctcgtttactatctcagattgtatagacaacgcttctgagtcccatcctttgtac

SEQ ID NO: 921 - DNA, 174 bp, Artificial Sequence
  Description of Artificial Sequence: Synthetic polynucleotide
ggctaaaaaaaatggcgcaatccatagtcgtagatggggactacgacgctcttgctagtagatatcttaaatttgtttatgattttgaaaatgtaacttatcaaaataattacttcgccacagataaatttaaaaaagacatagagcaatatcttaaatcaatccatgatggag

SEQ ID NO: 922 - DNA, 174 bp, Artificial Sequence
  Description of Artificial Sequence: Synthetic polynucleotide
tcttctataaattcagtggtacttgaggtcatttcattatccacacctaccgccgaagaggcctcataagtgacgttgttttctattgcacggggaacatttattaagtgggaggcaaataacaattctgaaaataacaaatcgttttttagcagaagggctggattataagcg

SEQ ID NO: 923 - DNA, 174 bp, Artificial Sequence
  Description of Artificial Sequence: Synthetic polynucleotide
aagacagatggaaatacttatatagtagaattagtttgtttgaatttccaaacccatttccattagataaaaatggaaatcctgtatatgtgttaaatgatgaaaattggaaatcattttttcaaaggttgtggtccagcttagaatttcaagaatcagaggacgaggaagaaa

SEQ ID NO: 924 - DNA, 174 bp, Artificial Sequence
  Description of Artificial Sequence: Synthetic polynucleotide
caactctacgggctattctaattcaggtttctctagaatcggggttggggttattctctgtcttgtgattctctttattcttatactaacgcttctctgcctaaggctcgccgcctgctgtgtgcacatttgcatttattgtcagctttttaaacgctggggtcgccacccaag

SEQ ID NO: 925 - DNA, 174 bp, Artificial Sequence
  Description of Artificial Sequence: Synthetic polynucleotide
attctcaaatgattatattgaccaatacgtcttctaacagggggcaagtattctaaagacatattacccaaaatatctctatgattcctatcccgttatgtatttaatatgtaaagttaaggcgtagcctacaacaaacttcccgtttatcttccaggctctaaattggagaaa

SEQ ID NO: 926 - DNA, 174 bp, Artificial Sequence
  Description of Artificial Sequence: Synthetic polynucleotide
aatgattttgaaacatattaagatgtttatacgagcgtgttgtttactattttcaggatatgtggaagcggttgtgtatgatctatacgcacatttagttcccagagggcgttgtcgtctccccctaagcaagggagaaacacgtggcacatgatcttgcgcttaacgataaaa

SEQ ID NO: 927 - DNA, 174 bp, Artificial Sequence
  Description of Artificial Sequence: Synthetic polynucleotide
tctatgctctcccaaaaccggaggtgagctccgcggtcttcctactgacgacccctgggtggtagcgggttttgtaacgttaggagtagttgcgggtgggcttgtgctgatcctttgctacctatacacaccttgctgtgcatatttagtcatattgtgctgttggtttaagaa

SEQ ID NO: 928 - DNA, 178 bp, Artificial Sequence
  Description of Artificial Sequence: Synthetic polynucleotide
tgatcttgctttcgtaataaaattctgtacataaaagtcgaaagtattgctatagttaaggttgcgcttgcctatttaggcatacttctcaggatggcgcgttgcagtccaacaagatccagggactgtacagaattttcctatacctcgagtcgggtttggaatctaaggttgactc

SEQ ID NO: 929 - DNA, 174 bp, Artificial Sequence
  Description of Artificial Sequence: Synthetic polynucleotide
tagccatatatccataccttgacattggctggaatgccatagatgccatgaaccaccctactttcccagtgcccgctgtcataccactgcaacaggttattgccccaatcaatcagcctcgccccccttctcccacccccactgagattagctactttaatttgacaggtggag

SEQ ID NO: 930 - DNA, 385 bp, Artificial Sequence
  Description of Artificial Sequence: Synthetic polynucleotide
gtatacgagaattagaaaaggcactcgtatacgtattgggcaattaaaaataataattaggcctagggaacaaatccctctcagcgaaggccgaaaagaggctagccatgcccttagtaggactagcataatgaggggggtagcaacagtggtgagttcgttggatggcttaagccctgagtacagggtagtcgtcagtggttcgacgccttggaataaaggtctcgagatgccacgtggacgagggcatgcccaaagcacatcttaacctgagcgggggtcgcccaggtaaaagcagttttaaccgactgttacgaatacagcctgatagggtgctgcagaggcccactgtattgctactaaaaatctctgctgtacatggcac

SEQ ID NO: 931 - DNA, 174 bp, Artificial Sequence
  Description of Artificial Sequence: Synthetic polynucleotide
gctcgtccctctttaacgtcaacgatatttacgaactgttgtactttttagtgttggggtttcttccgagcgtggcggtgttgtaatttccaccacgtgtcgctcgctgcataaagggcgaacgtcctcggagagggtatattcgttcggcgagagcgggcggcggtggtgggt

SEQ ID NO: 932 - DNA, 174 bp, Artificial Sequence
  Description of Artificial Sequence: Synthetic polynucleotide
ggcaaaaaaagcccaacacgcaatgcgtttattgcaattcagttcactggtgcaatgagggtattggggctttttgaacgtgggaataacttgaatttcgcagatacctacgtatatacatggaaccaacagtactcgtatcatgaaaatgcattcctaatttcaaatcaagta

SEQ ID NO: 933 - DNA, 174 bp, Artificial Sequence
  Description of Artificial Sequence: Synthetic polynucleotide
ttgaaaaacatgtttggttagccattcatttttttaaagcatttcaggtttcaaaattaaaccacaaaaataaaacgcttatatctgatttcttaaaggatttcacacagctcttagcagatcaaaactttgaaattgtcgatcctacatttaccattcattattacgtttagc

SEQ ID NO: 934 - DNA, 174 bp, Artificial Sequence
  Description of Artificial Sequence: Synthetic polynucleotide
attatacctggtagagagtcagtgtccattttgccaggctatcatacgatttgtatgcgtagcaagcaacactgggatacggaatctacaggcactcctggtcaacagtcaccttgacctcgcttgtcacgcctgtgtcgagcagaatggcgtccagggtctcagacaccggca

SEQ ID NO: 935 - DNA, 174 bp, Artificial Sequence
  Description of Artificial Sequence: Synthetic polynucleotide
aaccctagccataaccgcataactctgttcacaaccctaacactaatcctcgcatccgcacctaacgctgcccctctttcacaccatcaccccctgccgcttcaacttcaccttcttcctccatctcgccccgcttgtttctacacttgtccgcccctctattcttactctagg

SEQ ID NO: 936 - DNA, 174 bp, Artificial Sequence
  Description of Artificial Sequence: Synthetic polynucleotide
gaaattcccctgtattgtaataagacctcattaacatatttcccctgcttagtactatgcagaaacccccgagcaaattaaaattgatgaagattaagaaaaagagggattttctcaggaaaaatcttttttcttaccttcatctcatttaaacaaatttaggactcaggaaaa

SEQ ID NO: 937 - DNA, 174 bp, Artificial Sequence
  Description of Artificial Sequence: Synthetic polynucleotide
gagaggcaatcttcctcccgtgaaggacacaagcagtagctcacaatcatctcgtgtttcagcaaagtgtgcataattataaagtgctgggtcatctaagcttttcagtcgagaaaaaaacagtagatcagaagaacaactggcaacacttctcatcctgagacctacttcaag

SEQ ID NO: 938 - DNA, 174 bp, Artificial Sequence
  Description of Artificial Sequence: Synthetic polynucleotide
ccccacggaaagagaatatcgtggtcttctccatcgcttacagcttgtgcacggtgctaatcaccgcgatcgtgtgcctgagcattcacatgctcatcgctattcgccccagaaataatgctgagaaagagaaacagccataacaccatttttttcacacacctttttcagacc

SEQ ID NO: 939 - DNA, 174 bp, Artificial Sequence
  Description of Artificial Sequence: Synthetic polynucleotide
atgtatgttggatgtatttacatagtaggataacatgttttgaatttaaacaaccttttccatttgatgaaaatggtcaaccggcattttccttaacagacatcaattggaaatctttttttgaaaggttttggagccagttagacttaagtgaccaagaagacgaggagagtg

SEQ ID NO: 940 - DNA, 174 bp, Artificial Sequence
  Description of Artificial Sequence: Synthetic polynucleotide
agggagtctgggtatcctgggtatttcctgttttgtaggattgaaggaaataatatactttatctttgttagtgttgactacatgtggcctttttgtgatacgttattgactacggcggttaattgtttcttcaaaggccgtacctttcttcgacgtgaattaaaaatttaaaa

SEQ ID NO: 941 - DNA, 174 bp, Artificial Sequence
  Description of Artificial Sequence: Synthetic polynucleotide
ggttcccccccgtggctctcgagatgagccagacccaacccccggccccagttgggccgggcgacccagatgtttacttaaaaggcgtgccgtccgccggcatgcaccccagaggtgttcacgcacctcgaggacacccgcgcatgatctccggacccccgcaacggggtgata

SEQ ID NO: 942 - DNA, 174 bp, Artificial Sequence
  Description of Artificial Sequence: Synthetic polynucleotide
aattcttatactatctgttattctttattttatattctgccgtcaaatacccaatgttcatagaaattctaaaagacgtcccatctattctcctatgattagtcgtccccatatggctctgaatgaaatctaagatctttttttttttctcttacagtatggtgaacatcaatc

SEQ ID NO: 943 - DNA, 174 bp, Artificial Sequence
  Description of Artificial Sequence: Synthetic polynucleotide
gcccacttgcaaactatagaccttaaagacgcctttttccaaatccccctacctaaacagttccagccctactttgctttcactgtcccacaacagtgtaattacggccccggcactagatacgcctggaaagtactaccccaagggtttaaaaacagtcccaccctgttcgag

SEQ ID NO: 944 - DNA, 174 bp, Artificial Sequence
  Description of Artificial Sequence: Synthetic polynucleotide
ctatcgcagatacactccttatgaccctgaggacccagggcaagaaaccaatgtgtccatgtcattcatctggcagtccgccccggatatcgggcgaaagttagagcggttagaagatttaaagagcaagaccttaggagacttagtgagggaagctgaagagatctttaataa

SEQ ID NO: 945 - DNA, 174 bp, Artificial Sequence
  Description of Artificial Sequence: Synthetic polynucleotide
tgccagtcccacgcttagccctggctctgaattgtcagctgtagtggcccaggacttaagtgactttttgcagctgacattgaggcgcgagctcagggcggagggcagaaccttattgaatcttgttgttttgaacacgctgcaggtggtggagcagcaggatctgtttctatt

SEQ ID NO: 946 - DNA, 174 bp, Artificial Sequence
  Description of Artificial Sequence: Synthetic polynucleotide
acagaacaccgcaactcggtgttgtactcgtgttttttattcaacaataaagctttttcacgcttactcgagtgtgacgtgactttatgggggaacgccgtgtgggaatgacggtgattatattacactctataaacggtttctcatacgcgccttttgatagccaccgccgtc

SEQ ID NO: 947 - DNA, 174 bp, Artificial Sequence
  Description of Artificial Sequence: Synthetic polynucleotide
ggctgactatcctgttctgtcctggaaaaactttcagcgtcgtaggtggactttgtagtatgcgggttagtgaagttatgtcatttatttacgtttacgatctcgtattacaaaccgcggagaggatgacaccgttcggccccatgagttatttttattcttccggtaggaggc

SEQ ID NO: 948 - DNA, 174 bp, Artificial Sequence
  Description of Artificial Sequence: Synthetic polynucleotide
tgaaatcagcaataaggtctctgttgaaattttctcccagcagcacctcacttccctcttcccaactctggtattctaaaccccgttcagcggcatactttctccatactttaaaggggatgtcaaattttaactcctgtcctgtacccacaatcttcatgtctttcttcccag

SEQ ID NO: 949 - DNA, 174 bp, Artificial Sequence
  Description of Artificial Sequence: Synthetic polynucleotide
taggttcgcgtgcggttttctgggtgttttttgtggactttaaccgttacgtcattttttagtcctatatatactcgctctgtacttggccctttttacactgtgactgattgagctggtgccgtgtcgagtggtgttttttaataggtttttttactggtaaggctgactgtt

SEQ ID NO: 950 - DNA, 174 bp, Artificial Sequence
  Description of Artificial Sequence: Synthetic polynucleotide
tcagcttacgatctcttgtcagatctcattaaatctaaactttttaaacaagattccctgttatccatgcttgtgagtgtggtttaatcataatcttgtattttactttccacacttttcatctctctgccagtgacgtgttggttgtcctcagcgtccctcccataggtcgca

SEQ ID NO: 951 - DNA, 174 bp, Artificial Sequence
  Description of Artificial Sequence: Synthetic polynucleotide
aggctttaaatccattagattggacacaatatttcatttttataggtgttggagccctgcttttagtcattgtacttatgattttccccattgttttccagtgccttgcgaagagccttgaccaagtgcagtcagatcttaacgtgcttcttttaaaaaagaaaaaagggggaa

SEQ ID NO: 952 - DNA, 174 bp, Artificial Sequence
  Description of Artificial Sequence: Synthetic polynucleotide
cttggtttctggagacaggctaaggatgcccttcaggtaccccgaggtaacaagcgacactcgggatctgagaaggggattggggcttctatccaagcgcccaatttaaaaagcttctatgcctgaataggtgaccggaggccggcaccttttcctttacccacaacttacttt

SEQ ID NO: 953 - DNA, 174 bp, Artificial Sequence
  Description of Artificial Sequence: Synthetic polynucleotide
agatcaccaactttcggtgctgttgtttaatcacaatgacaggttttacgagggtcgagctggagaccctgtggcttgtcttgtgatggaaagactgatttttccacctgttcgacaggctactatgatatgacgcttgtttcttttattttgcagactaattcaaaactaaca

SEQ ID NO: 954 - DNA, 204 bp, Artificial Sequence
  Description of Artificial Sequence: Synthetic polynucleotide
aacgtttctcttctggttaccagcaacataggaaattgtcgttgaactacatgttgtaaggctttagagaaataagggagtgtcctatttaggatgaggtgctccggtggcagccccaccaaaacctctagcgactaggaacagctatatcgggttgctatagcagtcaggatgtcattctggcgttccgaaatacccaaacct

SEQ ID NO: 955 - DNA, 174 bp, Artificial Sequence
  Description of Artificial Sequence: Synthetic polynucleotide
aagtagatccaggaacagcagacagaatgatacacctatattattttaactgttttacagatagagccatccaacaggctatcagaggggagaagtatacgtggtgcacattcaaggaaggacataaaggtcaggtacaatcactgcaacttttggcactagttgcatatacaa

SEQ ID NO: 956 - DNA, 628 bp, Artificial Sequence
  Description of Artificial Sequence: Synthetic polynucleotide
cactgggtgcaagccccagaaaccgacgcctatctaagtagacgcaatgactcggcgccaactcggcgaccggccaaaaggtggtggatgggtgatgacagggttggtaggtcgtaaatcccggtcaccttggtagccactataggtgggtcttaagagaaggttaagattcctcttgtgcctgcggcgagaccgcgcacggtccacaggtgttggccctaccggtgtgaataagggcccgacgtcaggctcgtcgttagaccgagcccgtcacccacctgggcaaacgtcgcccacgtacggtccacgtcgcccttcaatgtctctcttgaccaataggcttagccggccgagttgacaaggaccagtgggggtcgggggcttggggagggaccccaagtcctgcccttcccggtgggccgggaaatgcatggggccacccagctccgcggcggcctgcagccggggtagcccaagaatccttcgggtgagggcgggtggcatttctcttttctataccatcatggcagtccttctgctccttctcgtggtcgaggccggggccattctggccccggccacccacgcttgtcgagcgaatgggcaatacttcctcacaaactgttgc

SEQ ID NO: 957 - DNA, 174 bp, Artificial Sequence
  Description of Artificial Sequence: Synthetic polynucleotide
attgtgctaaatgtaactgaggagctgagaagtgaccaccttaccctgtcttgcctgcggactgactatgagtcaagtgatgaagacgacaactgaggtaagtgggtggagctaggtgggattataaaaggctggaagtcaactaaaaattgtttttgttcttttaacagcacg

SEQ ID NO: 958 - DNA, 174 bp, Artificial Sequence
  Description of Artificial Sequence: Synthetic polynucleotide
gaggagctgaggcccgatcacttggtgctggcctgcacccgcgctgagtttggctctagcgatgaagatacagattgaggtactgaaatgtgtgggcgtggcttaagggtgggaaagaatatataaggtgggggtctcatgtagttttgtatctgttttgcagcagccgccgcc

SEQ ID NO: 959 - DNA, 174 bp, Artificial Sequence
  Description of Artificial Sequence: Synthetic polynucleotide
ttggctcattatttctgttgtttttgttgtattgttgagtcttcttgtgttttgttgtctttctacaggttgttgtggttgttgcaattgtttaacttcatcaatgcgaggctgttgtgattgtggttcaactaaacttccttattacgaatttgaaaaggtccacgttcaata

SEQ ID NO: 960 - DNA, 174 bp, Artificial Sequence
  Description of Artificial Sequence: Synthetic polynucleotide
acatagcagaatctgaaaggtcaccattcaagattgattctacgtgtaagcattgtcattgtcgcgttagactgtgttgtgtcgccaccgacgcagctatccgtgtgtttgagtgccttcttcaatcagaattttcttttctgtgtcttaagtgctccaaagaattgctacgaa

SEQ ID NO: 961 - DNA, 174 bp, Artificial Sequence
  Description of Artificial Sequence: Synthetic polynucleotide
acacttatcataagaggtgttagttcctaaggataatcaatacacaatattccacgacaattggcgcccaacgtggggctcgaatataagtcgggatatttataaaaatattaattttaatccctagggaccttcgtgcactgcggaaggtataattctactgccttaatagaa

SEQ ID NO: 962 - DNA, 174 bp, Artificial Sequence
  Description of Artificial Sequence: Synthetic polynucleotide
cgttatccctcccaaatcgcctcctttgttttagcctggacccgggcttttgtctcagaatggtccgagatcttgtacgcagaggacagaggcacaccgttggaacagcgtaccctcaaatcagtttacggagacacagacagcttgtttgtcaccgaagccggataccgcctc

SEQ ID NO: 963 - DNA, 174 bp, Artificial Sequence
  Description of Artificial Sequence: Synthetic polynucleotide
tgcagtctgggcctgacataacttttcctactgcatctatgggaacaccctttagtcctgtaactcctgctttacctacaggccctgtttttattacaggttctgacttctatttgcatcctacatggtactttgcacgcagacgccgtaaacgtattcccttattttttacag

SEQ ID NO: 964 - DNA, 174 bp, Artificial Sequence
  Description of Artificial Sequence: Synthetic polynucleotide
cagaatacaatgctaaacaagctatccatctccagcttatgttaaaatcccttgaaaaatcaaaatttgcaaaagagccatggtcattaactgatgcaagtgcagagcttgtaaatactcctcctagggactgcttcaaaaaaggaggatttacagtaactgtgtactttgata

SEQ ID NO: 965 - DNA, 174 bp, Artificial Sequence
  Description of Artificial Sequence: Synthetic polynucleotide
atatagactgggaaggaaataaacatttctatgtgcggtttgcagatgaggcaacacaatttgatgcagcaaatgaatggcaagtacgaactgaaagtgaaataatatctaattctgttaccagcacccccccacggagcgacccgaggcctactggatcttctgccatcacct

SEQ ID NO: 966 - DNA, 642 bp, Artificial Sequence
  Description of Artificial Sequence: Synthetic polynucleotide
aactctaagccgaacaattatagctaggctttttattatataacattaattaggcattagcgttgtcgccaatctcttggtaatcctaaggatacctttcctgttgactaagatgaagcgccttcggttaccgatgcccggtgtccacgaagccatcgtggtcggccgcgtcccccacctctcccaacttggactccatgttttcagtaggtgtaatgattagtattattgattctgctcgttcaatgtgtttatcttcacgatctgggacccaacacatgcttcactcatgtttaaatgttggttccctcattttgaagacacccaaaccatagagtgcgagaatgaggatttctacttccattctggtaacagaaatgaattcctgcgtgtgtctcgtaaatggaatctttaagaacttcagataaatcgaacaatacactaatacaagttgttttctaccaacatgttcaatgcggctaatctgaccgtggagctgtgaagcgctcaaacccgagtgttgtatacagtcgtaatgcgtaagtccatgaggaaccgactactgttacctctgttggtgtgtttctcctttattctcttttattattatttgttattgcaaatactacaactttgatcaac

SEQ ID NO: 967 - DNA, 174 bp, Artificial Sequence
  Description of Artificial Sequence: Synthetic polynucleotide
atatcatccacatccgttacagtaaacaggaaaaagtgcaagtatctggacataggcaatttgttaagtgtaattgtttcagagattttttcagaaattattttcttgtttgtttcagatcttctggagggtagactttgcattttcgttgaagccttcggatgattaggaaaa

SEQ ID NO: 968 - DNA, 174 bp, Artificial Sequence
  Description of Artificial Sequence: Synthetic polynucleotide
aaaaggtcataccccgtaaacggcgggctccagtcccggcccggcggttggcgtgaacgcaacggcgggagctgggttagcgtttagtttagcattcgctctcgcctttccgcccgccccccgaccgttgcgcctttttttttttcgtccaccaaagtctctgtgggtgcgcgc

SEQ ID NO: 969 - DNA, 174 bp, Artificial Sequence
  Description of Artificial Sequence: Synthetic polynucleotide
tttcgtggaagacgtcgggaatatgtcgattcaacgttgtttgtttctaacagttgtagcatccttagcgcgatcgtagacgtttatgtgagactgccggtaacgctgccgttatcgttttttttattttttttttccttttaattttatctcggattccgcacagaaaaaaaa

SEQ ID NO: 970 - DNA, 174 bp, Artificial Sequence
  Description of Artificial Sequence: Synthetic polynucleotide
ccccagactgtgcagatgtcctaatacatagcacttatttcccttgctttacagcaggtgaagtaagaagagccatcagaggggaaaagttattgtcctgctgcaattatccccgagctcatagagcccaggtaccgtcacttcaatttctggccttagtggtagtgcaacaaa

SEQ ID NO: 971 - DNA, 174 bp, Artificial Sequence
  Description of Artificial Sequence: Synthetic polynucleotide
caaaggtcagggcccaagggggttcgcgttgctaggccaccttctcagtccagcgcgtttacgtaagccagacagcagccaattgtcagttctagggagggggaccactgcccctggtataaagtggtcctgcagctatttctggtcgcatcagagcgccaggagtccacacaa

SEQ ID NO: 972 - DNA, 174 bp, Artificial Sequence
  Description of Artificial Sequence: Synthetic polynucleotide
tgtagtacacagaatcgcaaacagtcagacgtctccgaacatgatcagaactcgccatcagaatcgtcagtggatgaaaacgaacccccttaaacacgttttccaacttaataaatgctacccacataaaatcacgtgctagctctgttttctttgttttgtcttccatagagc

SEQ ID NO: 973 - DNA, 174 bp, Artificial Sequence
  Description of Artificial Sequence: Synthetic polynucleotide
gtatatatgttgtgtttatatatattccattatttgtaattcatacacatgcatcttttttaagtcaacagtaacttttttacttgtgtatactgttgtttgtattggtattggtattggtattggtattggtattggtataataaacttttttactttttttttattattacc

SEQ ID NO: 974 - DNA, 174 bp, Artificial Sequence
  Description of Artificial Sequence: Synthetic polynucleotide
aattgctcccaccctcaattttcgcttgccttcttcccttgttaacctgatagcatagcctctaggtttccttgtaggtctgtttgggtttgttggttcacgtggtgctaacttgaattttttggttttctagttccctcttaattacatttgtgccagatcttgtagagcaag

SEQ ID NO: 975 - DNA, 353 bp, Artificial Sequence
  Description of Artificial Sequence: Synthetic polynucleotide
ttcgataccaagagctggtgtctgagggattacgactcgcgtggtcggacagcacatgttagtcatgtattatggtgtttcccaacacgtatctttgctctagtattgaactttagtgatgagtgtacttggcatgtacacctgattagttagcccttgtggatacgccactgccgctcaggtacagtaggacataccccaaatattgggttccactcgtagagaagaaaattagtggcgaaacgtacggtttatgtcaaaggagaaggtgattttaattgcacctgaagcaaccctaggtcttccctttgatgtgagctaataaggagtaaccgattcttacaatgtgatca

SEQ ID NO: 976 - DNA, 175 bp, Artificial Sequence
  Description of Artificial Sequence: Synthetic polynucleotide
agtgttgtgtgatcttgcgcgataaatgctgacgtgaaaacgttgcgtattgctacaacacttggttagctatttagctttactaatcaagacgccgtcgtgcagcccacaaaagtctagatacgtcacaggagagcatacgctaggtcgcgttgactatccttatatatgacct

SEQ ID NO: 977 - DNA, 174 bp, Artificial Sequence
  Description of Artificial Sequence: Synthetic polynucleotide
caccaccagatcatacattcaaaaagggagggcaaacaattgaggtaatctatgatgaggatcccaataatagcaccagacatactgtatggcgccatatatattatcaaaacggtgataacagatggagaaaagcagctagtgatgtagatgttcatggtgtgttttatttag

SEQ ID NO: 978 - DNA, 174 bp, Artificial Sequence
  Description of Artificial Sequence: Synthetic polynucleotide
tgaatgcggattgcagctatgtcaaatcgcaatgcataaaactttcggaatgcgagtgtttatatacttttgcttctgatgtatgtaaggaagattttcataattccgaggaaatgaaggtgtttgttgtccaacattcgcaggaaatcgttggtggaacggatttttctgtac

SEQ ID NO: 979 - DNA, 174 bp, Artificial Sequence
  Description of Artificial Sequence: Synthetic polynucleotide
tgctgctatacattggctgcttatggtgacaattgacaaattgttaccatatagctattggattggccatccggtgacaaacagagctattgtttacttgtttgttggtttcataccattaaattacaaggtcttagaaactctcaactttattttgacactcaatacagcaaa

SEQ ID NO: 980 - DNA, 174 bp, Artificial Sequence
  Description of Artificial Sequence: Synthetic polynucleotide
aagagattatgttagctgtgtactcaaactgtaaaattaagcattatttaagattaatctatatacggcagattaacgagctttcgcatttaatacatactcagaaacaaagtgatttgactttgacacctgatttaggatccacaaacccagaagattttcaatatccgcaag

SEQ ID NO: 981 - DNA, 174 bp, Artificial Sequence
  Description of Artificial Sequence: Synthetic polynucleotide
taaacgctcagtataaaaggccggtggacacgtatgatccttgcctaattctaacgggagaggcagaaagatatatggtggacgctgtgggaaattaccgggaagcctccactggaactaccgtactctaccccacgtatgatctgggctccatagttgcggacatggtgactt

SEQ ID NO: 982 - DNA, 174 bp, Artificial Sequence
  Description of Artificial Sequence: Synthetic polynucleotide
ggctataaaatggcttcgctcatttatagacaattgctcacgaattcttatacagtagatttatccgatgagatacaagagattggatcaactaaatcacaaaatgtcacaattaatcctggaccatttgcgcaaacaggttatgctccagttaactggggacctggagaaatt

SEQ ID NO: 983 - DNA, 174 bp, Artificial Sequence
  Description of Artificial Sequence: Synthetic polynucleotide
tctcagtcgtaagacgctcaactttgtctcgatctagccacgcaaacggaatcggatgtctttgcagatccatattttagaaaacaaactcaaaaacagaactgctcatttccgccaacattcaatgtttaatagtcttttttttacccacacagaaaactgacaagcgacgag

SEQ ID NO: 984 - DNA, 174 bp, Artificial Sequence
  Description of Artificial Sequence: Synthetic polynucleotide
gtattaaaaattgatagcgcttgcgtaagagtaagatctcaagatggatcctgtatctgtagtacatagcttcgctaggagtcaaggcctgccacttaactttgaaactgtgggttgtgagggtccaagtcacgacccacgctttgtaattgaatgtaaatttcttgatttcca

SEQ ID NO: 985 - DNA, 174 bp, Artificial Sequence
  Description of Artificial Sequence: Synthetic polynucleotide
acccgacgaaaaaaacatcccagattcaatgattgcaattgttgcagcggtggcagtggtgatggcactaataataatatgcatgcttttatatgcttgtcgctacaaaaagtttcatcctaaaaaacaagatctcctactaaggcttaacatttaatttctttttatacagcc

SEQ ID NO: 986 - DNA, 174 bp, Artificial Sequence
  Description of Artificial Sequence: Synthetic polynucleotide
cgctgagttactttggaagcgttcagcgcattggtcgttgcgcaacggaggacattaaatcgggttttctgcagtatcgtggaattaccctgccggtgataaagctagagaacatattcgttgacctttctgagaaaaaagtgttcgtatagcttctgagccttctgtctgaag

SEQ ID NO: 987 - DNA, 174 bp, Artificial Sequence
  Description of Artificial Sequence: Synthetic polynucleotide
gaagtgtgtccccctccattccacccactgatatacgcccgacaataaagttgatgatattgaattccacacctactcgtgtttgtgattttatttcatattccatgagagagacctcgcatatttgcagagggtcactgaaacattttatcttaaaacagttacacctgaaaa

SEQ ID NO: 988 - DNA, 174 bp, Artificial Sequence
  Description of Artificial Sequence: Synthetic polynucleotide
tatacgtaaagagaacattgtggcattttccattgcttattgcttggtaacatgcatcatcactgctatcatttgtgtgtgcatacacttgcttatagttattcgccctagacaaagcaatgaggaaaaagagaaaatgccttaacctttttcctcataccttttctttacagc

SEQ ID NO: 989 - DNA, 174 bp, Artificial Sequence
  Description of Artificial Sequence: Synthetic polynucleotide
tggatgtaatggaggatcaatccttaagatatctgcatagtagactagtatgttttaaattccctaacaaattaccactgaatgacgatggctcccttgtatatgaaataacgaatgatacatgggcctgtttttttagaaaatttgctacccagttaaacctggtcttagaag

SEQ ID NO: 990 - DNA, 174 bp, Artificial Sequence
  Description of Artificial Sequence: Synthetic polynucleotide
gaattccttcgcatgaacttaaatccgctccgggagcgccacgagcgcgatgacgtcattagtgagcacatactatcggctctgcgcgatccgaacgtggtcattgtctattaacccgccgtccccttacagttccaccgaacccggcccgggggactcactacccaccgcgag

SEQ ID NO: 991 - DNA, 174 bp, Artificial Sequence
  Description of Artificial Sequence: Synthetic polynucleotide
acttacttgaaatctgaaaccaggtctctgtccatgttttctgtcagcagcacttcgctcccctcttcccagctctggtactgcaggccccggcgggctgcaaacttcctccacactctgaaggggatgtcaaattcctcctgtccctcaatcttcattttttatttctattag

SEQ ID NO: 992 - DNA, 395 bp, Artificial Sequence
  Description of Artificial Sequence: Synthetic polynucleotide
tcccgcatggcaagggcgtgctaccttgccccttgacgcatggtatgcgtcatcatttgccttggttaagccccatagaaacgaggcgtcacgtgccgaaaatccctttgcgtttcacagaaccatcctaaccatgggtgtagtatgggaatcgtgtatggggatgattaggatctctcgtagagggataggtgtgccattcaaatccagggagtactctggctctgacattgggacatttgatgtaaccggacctggttcagtatccgggttgtcctgtattgttacggtgtatccgtcttggcacactgaaagggtatttttgggtaatcctttcctactgcctgatagggtggcgtgcccggccacgagagattaagggtagcaatttaaac

SEQ ID NO: 993 - DNA, 174 bp, Artificial Sequence
  Description of Artificial Sequence: Synthetic polynucleotide
ggcctggtgtgggacgacgaggactcggccgacgatagcagcgtgttggacttgggcgggagcggtggggtcaacccgttcgcgcatctgcagcccaaactggggcgacggatgttttgaaatgcaaaataaaactcaccaaggccatagcgtgcgttctcttccttgttagag

SEQ ID NO: 994 - DNA, 174 bp, Artificial Sequence
  Description of Artificial Sequence: Synthetic polynucleotide
gtcctacattccagttaatctatgggggcgtgatatattaagcaaaatgggtgtttatttatatagtccttcacccactgtgacagatttgatgttagaccaaggcttacttccaaatcaaggtttaggtaaacaacatcaaggcatcattttaccccttgatttaaaatctaa

SEQ ID NO: 995 - DNA, 174 bp, Artificial Sequence
  Description of Artificial Sequence: Synthetic polynucleotide
cattatttaatgtaaatgatacttatgatttcatctattttctagttttgggttttctgccaataccggccgttatataaggcgggatgttgtgttgattacgtcaatacggatggggttttggatataaagacttacagagcttttaaagaatcattacttcgtttattcagg

SEQ ID NO: 996 - DNA, 174 bp, Artificial Sequence
  Description of Artificial Sequence: Synthetic polynucleotide
ttcaagtaactctacaagcttgtctaatttttctggaattggggtcggggttatccttactcttgtaattctgtttattcttatactagcacttctgtgccttagggttgccgcctgctgcacgcacgtttgtacctattgtcagctttttaaacgctgggggcaacatccaag

SEQ ID NO: 997 - DNA, 174 bp, Artificial Sequence
  Description of Artificial Sequence: Synthetic polynucleotide
aagtgctaatacacctggtggtttttcttgaagaccattggaagaagtaaaagggggtgtaacaaagggtacgtctgatgtgtcaaatgggtcaaaagggtaaacggggttgaagtcatcattttcttctgtttcttcagcatactgggttctgctgcgcttcatctagaaaag

SEQ ID NO: 998 - DNA, 174 bp, Artificial Sequence
  Description of Artificial Sequence: Synthetic polynucleotide
tgcgtgtctccccgcacttgtggttaaaaccatgaaagttcatcccaaacaatcttttcctcttctttttcttttagtggtgacaacctactggattggtgattaccaatctgtactagtgttgtattaagacttgttgtgtggagaaaatggactctttcaagaagatttttg

SEQ ID NO: 999 - DNA, 174 bp, Artificial Sequence
  Description of Artificial Sequence: Synthetic polynucleotide
tgggggatttgggagaaaatagtctattgcgtattttctgttcaataattggactgcgttatttaaaggtctgattggttgattgggttataaaaggaattactcctttaaattttacttaatgtacccacaatatcaagtggtcgtttgtatttaacgattattaccggtacc

SEQ ID NO: 1000 - DNA, 174 bp, Artificial Sequence
  Description of Artificial Sequence: Synthetic polynucleotide
gactcgtatgtcctccagtcggacaagacgtggtcgtagctacagttggccaatgcattcttgtacaggtggataaatagctgtctgaaaaaaacacccgggtttcgcaggctgcagtgtagagtctgacctctgacataagaatacttgccttgcaggatctcaaagagggag

SEQ ID NO: 1001 - DNA, 174 bp, Artificial Sequence
  Description of Artificial Sequence: Synthetic polynucleotide
tatatagtgggtcagacatttacacgcccacatcttccccgacatggccatcattgccccccccacccaccactaacttacctgcaatagttgtgcatggggataattattatttatggccctatatttatttaatccataaacgccgtaaacgtatgccttattttttttcag

SEQ ID NO: 1002 - DNA, 174 bp, Artificial Sequence
  Description of Artificial Sequence: Synthetic polynucleotide
acctataaaacaggacatacaacgttacagaatagtgtgtggttgtacacagtgtggacggtcagttaaacttgttgtcagtagtacaggcgcggacatacaacagctgcatcagatgcttctggacacactgggcattgtgtgtccattgtgtgcctgcgtggagtgactgca

SEQ ID NO: 1003 - DNA, 174 bp, Artificial Sequence
  Description of Artificial Sequence: Synthetic polynucleotide
aacttgtcttatgctggatgtacgcgtagagccactgcttgaagccacagttgatcaccttgaaaatagagtgggttttgacctggctgtatgttttcaccaacacagcggcggtgaacgctgtcacctgcgtgacttgcactttatcgtccttcgagaccgtttggaataaaa

SEQ ID NO: 1004 - DNA, 174 bp, Artificial Sequence
  Description of Artificial Sequence: Synthetic polynucleotide
aattacttaccggaaatctgaaaatacatcatggtctccgtgtactcttataaaatttccctcttcccaactgtcaaacctgacagacttgcaaacagcaaactttctccaaatcttaaatggaaggtcagattcttcttcccaatccctacccaccatcttcatcttttctag

SEQ ID NO: 1005 - DNA, 174 bp, Artificial Sequence
  Description of Artificial Sequence: Synthetic polynucleotide
ctggttgtctgtgggatctttattcttgtggttcttctgtactttgtctgctgcaaagccagagagaaatctaggaggcccatctacaggccagtgattggggaacctcagccactccaagtggatggaggcttaaggaatcttctcttctcttttacagtatggtgatcagcc

SEQ ID NO: 1006 - DNA, 174 bp, Artificial Sequence
  Description of Artificial Sequence: Synthetic polynucleotide
cgcacatgtgatcctaggcgattcttgatcgcgcttattagctaaccaatttaatttggtgttgaagtgttgacacgctctctaacacatggggcagcttatcagcttctttcaggagattcctgtttttctacaggaagctctgaacatcgctttagtggctgttagtctcat

SEQ ID NO: 1007 - DNA, 174 bp, Artificial Sequence
  Description of Artificial Sequence: Synthetic polynucleotide
ggtttaagcagagtctgagccgttcagaggctcatttgataaatagaagatttatttgggcttggtggtaagtgtgattttatgttttctttgattttcttgtagacttgttcctgacgctgctacaggagcagaagactaacaagcttcatttatttttccaggtaagcaaac

SEQ ID NO: 1008 - DNA, 174 bp, Artificial Sequence
  Description of Artificial Sequence: Synthetic polynucleotide
gtataaattttgtatccgatagtagcacatagaatcacaatcacatccccgttttttgaaattttataatttctacagcaaattttatatcaaatgcctaggaaaaaggagcaggccagcaagagtgaaaatgaaaagcaaacaagtaacgttcaagctcaagatttcaaaact

SEQ ID NO: 1009 - DNA, 174 bp, Artificial Sequence
  Description of Artificial Sequence: Synthetic polynucleotide
ttatgtgagcctgtgtgagctgacaaacttagtagtgtttgtgaggattaacaacaattaacacagtgcgagctgtttcttagcacgaagatctcgatgtctaagaaaccaggagggcccggcaagagccgggctgtcaatatgctaaaacgcggaatgccccgcgtgttgtcc

SEQ ID NO: 1010 - DNA, 174 bp, Artificial Sequence
  Description of Artificial Sequence: Synthetic polynucleotide
gaagacaggaacttactgtgctgctttttaatcacagggaccgatttttgtatgtccgcaagggccacccagtgggtaccctgttgctggagagagtgatttttccttcagtaaaaatagccaccttagtttagtgcatgctttctgtttttcagactctcatctctactaacc

SEQ ID NO: 1011 - DNA, 445 bp, Artificial Sequence
  Description of Artificial Sequence: Synthetic polynucleotide
accacaaacactccagtttgttacactccgctaggaatgctcctggagcaccccccctagcagggcgtgggggatttcccctgcccgtctgcagaagggtggagccaaccaccttagtatgtaggcggcgggactcatgacgctcgcgtgatgacaagcgccaagcttgacttggatggccctgatgggcgttcatgggttcggtggtggtggcgctttaggcagcctccacgcccaccacctcccagatagagcggcggcactgtagggaagaccggggaccggtcactaccaaggacgcagacctctttttgagtatcacgcctccggaagtagttgggcaagcccacctatatgtgttgggatggttggggttagccatccataccgtactgcctgatagggtccttgcgaggggatctgggagtctcgtagaccgtagcac

SEQ ID NO: 1012 - DNA, 174 bp, Artificial Sequence
  Description of Artificial Sequence: Synthetic polynucleotide
cttaagcgcctctgtagggaagccaggaatgtccaggaggtaccccttccgctcggaagggatctgacctggagacacatcacatgtgctttacacctgtgcttgtgtttaaaaattgtcgcagcttccccaaaccaagtggtcttggttttctctttttattatattgtcaat

SEQ ID NO: 1013 - DNA, 174 bp, Artificial Sequence
  Description of Artificial Sequence: Synthetic polynucleotide
ttcagcaagtaactgagaggtgggaagctcaaagccaaagtcctaatgtgcagtcaggtgaatttattgaaaaatttgaggctcctggtggtgcaaatcaaagaactgctcctcagtggatgttgcctttacttctaggcctgtacggaagtgttacttctgctctaaaagctt

SEQ ID NO: 1014 - DNA, 174 bp, Artificial Sequence
  Description of Artificial Sequence: Synthetic polynucleotide
ttttctataatacacgtggtttatttttataaaaaaaaaaggtcgtattcgtcatttgtgtggggaacgggtgtacaaaacggacgggaaaggctaactcgcgtttatatacttatatccgccaggaacgataaccgtgtccgctcaactttctaattgacatacggtaatacc

SEQ ID NO: 1015 - DNA, 174 bp, Artificial Sequence
  Description of Artificial Sequence: Synthetic polynucleotide
tgtggctcctccagtggaccctgcaggaaccctggattattctgaattatcacgtgaatctgacgtaatatgtacagttaaataagtgcaacttttgcttatattttacatacaaacttgtgtgtaccatagatgaacacatttttatttgttttgaattattaaacttaagac

SEQ ID NO: 1016 - DNA, 174 bp, Artificial Sequence
  Description of Artificial Sequence: Synthetic polynucleotide
agaattcgtcttgctctattcacccttacttttcttcttgcccgttctctttcttagtatgaatccagtatgcctgcctgtaattgttgcgccctacctcttttggctggcggctattgccgcctcgtgtttcacggcctcagttagtaccgttgtgaccgccaccggcttggc

SEQ ID NO: 1017 - DNA, 334 bp, Artificial Sequence
  Description of Artificial Sequence: Synthetic polynucleotide
ttcagggcctccctccagcgacggccgaactgggctagccatgcccacagtaggactagcaaacggagggactagccgtagtggcgagctccctgggtggtctaagtcctgagtacaggacagtcgtcagtagttcgacgtgagcagaagcccacctcgagatgctatgtggacgagggcatgcccaagacacaccttaaccctagcgggggtcgctagggtgaaatcacaccacgtgatgggagtacgacctgatagggcgctgcagaggcccactattaggctagtataaaaatctctgctgtacatggcacatggagttgaatcattttga

SEQ ID NO: 1018 - DNA, 174 bp, Artificial Sequence
  Description of Artificial Sequence: Synthetic polynucleotide
gtaatcaaggtagattttgtgctacattcactctttatggtaaatccaaacattatgataaatattttggagtaataaatggtttcacagcattcgctaatactgtagaggatgctgttaacaaactggttttcttagctgttgactttattacctggcgcagacaggagttaa

SEQ ID NO: 1019 - DNA, 211 bp, Artificial Sequence
  Description of Artificial Sequence: Synthetic polynucleotide
taaaaagcaaaaatgtgatcttgcttgtaaatacaattttgagaggttaataaattacaagtagtgctatttttgtatttaggttagctatttagctttacgttccaggatgcctagtggcagccccacaatatccaggaagccctctctgcggtttttcagattaggtagtcgaaaaacctaagaaatttacctgctacatttcaagata

SEQ ID NO: 1020 - DNA, 174 bp, Artificial Sequence
  Description of Artificial Sequence: Synthetic polynucleotide
acataacttcaagttcaacctcttccatgtcactgagacccagttcaaacccagagacactcagcccctccaccagtgacaattcaacgtcacatatgcctttactaacctccgctcacccaacaggtggtgaaaatataacacaggtgacaccagcctctatcagcacacatc

SEQ ID NO: 1021 - DNA, 174 bp, Artificial Sequence
  Description of Artificial Sequence: Synthetic polynucleotide
ctatttcgttcttggatcaatatttaattgcagacgaggttttgtggaacgttgttcccgtaatttgttttttcaggcagtggggactcaagttagatttttttaaaaagttttcggggaagaccaagcggttgtcattttcgtttatatgtgatttgttcgctaggtctcagg

SEQ ID NO: 1022 - DNA, 174 bp, Artificial Sequence
  Description of Artificial Sequence: Synthetic polynucleotide
cccgttacctttttaatatctatatagtttggtcccccctctatcccgcccaccgctgggcgctataaagccgccaccctctcttccctcaggtcatccttggtcgatcccgaacgacacacggcgtggagcaaaacgcctccccctgagccgctttcctaccaacacaacggc

SEQ ID NO: 1023 - DNA, 174 bp, Artificial Sequence
  Description of Artificial Sequence: Synthetic polynucleotide
aagcacagtggatttattataaagatcaaaaagataagaaatggaaaggaccaatgagagtagaatactggggacagggatcagtattattaaaggatgaagagaagggatattttcttatacctaggagacacataaggagagttccagaaccctgcgctcttcctgaagggg

SEQ ID NO: 1024 - DNA, 174 bp, Artificial Sequence
  Description of Artificial Sequence: Synthetic polynucleotide
tatacccacgttttagtgggtgggacttaaaagaaatgggtggagggatataggggtgtgtcttcgttggtaccaattataaaaatgtactcgccacaactcacaatttagaacgcatggcagttctgctacgtgtttggatgcccggacattagaatacagccagttgttacc

SEQ ID NO: 1025 - DNA, 174 bp, Artificial Sequence
  Description of Artificial Sequence: Synthetic polynucleotide
catgcgcaggcgcctgagtggcggctttctgcccgcgctcatccccataatcgccgcggccatcggcacgatcccgggcatagcttccgttgcgctgcaggcgtcgcagcgccgttgatgtgcgaataaaagcctctttagactctgacacacctggtcctgtatatttttaga

SEQ ID NO: 1026 - DNA, 174 bp, Artificial Sequence
  Description of Artificial Sequence: Synthetic polynucleotide
ctttgcggtgtacctgattttcacatttgtgactgctacctgcgtctgcagtattattactctgctaatcacctcgctccaattttttgattactactacgtgagaattgtttaccgcagacaccacccccgttaccaaaaccctcaaattgcggctcttttgcagctccaacc

SEQ ID NO: 1027 - DNA, 174 bp, Artificial Sequence
  Description of Artificial Sequence: Synthetic polynucleotide
caacacaattttcacatctagagtatcttttcaaaggaaaaatttcttcggggtatgtatggcaatgcattggaaaaatgctgcaatgttcatcaatagttaattgtgttttttttgttttatagaagtaccgtggactttcttgaagaaattgtgaagtctttataaaggacc

SEQ ID NO: 1028 - DNA, 174 bp, Artificial Sequence
  Description of Artificial Sequence: Synthetic polynucleotide
ccttgccgtcctcggggggcgttacatagcccggatcttgctccacttgctcattttcctcctcatgtttcactagctcgacggcgccgacctcagagttgggggtggttaaggtttcggagtctggctgcagcttaagatcctcctccatattttctcgcctaggagtaaagc

SEQ ID NO: 1029 - DNA, 174 bp, Artificial Sequence
  Description of Artificial Sequence: Synthetic polynucleotide
aactaaagacgtttggcctacaatctccaacttcgtttctggaataggtaatttcataaaggacactgctggaggtatttttggaactgcctttagttttctgggatatgtaaaacctgtacttttgggatttgtgataatattttgcataattttaattataaaaatcatagg

SEQ ID NO: 1030 - DNA, 174 bp, Artificial Sequence
  Description of Artificial Sequence: Synthetic polynucleotide
gcaattccacccaatgaaaaaaacattccaaattcaatgattgcaattattgcggcggtggcattgggaatggcactaataataatatgcatgctcctatatgcttgttactataaaaagtttcaacataaacaggatccactactaaattttaacatttaattttttatacag

SEQ ID NO: 1031 - DNA, 174 bp, Artificial Sequence
  Description of Artificial Sequence: Synthetic polynucleotide
aaattaaaacggttttcaccatgattaaccaaatcaattcccttacacaagaaaaaacgtttttcattgtggctgatgtttctgctgacaataggctggcaacttgtatatttaaagagtgaataaaaagttctttgaaatagtgtctgttgtaacagattttatttcagctcc

SEQ ID NO: 1032 - DNA, 174 bp, Artificial Sequence
  Description of Artificial Sequence: Synthetic polynucleotide
tgtacttttccctggtgacgcagtttcggggtgtgtgttgggtttggcgggattttttacactttactcccattacgtcagtttagggcttgtgtatatatatattgtggagaggttggagagtcactttagagcttgtgctttgtgtgcccgctgtactttgtctggtaagcc

SEQ ID NO: 1033 - DNA, 174 bp, Artificial Sequence
  Description of Artificial Sequence: Synthetic polynucleotide
gaatttcgaagtcgaccccatggatgagtccacccttctctatgttgtcttcgaagtcttcgacgtcgtccgagtgcaccagccccaccgcggcgtcattgaggccgtctacctgcgcacccccttctcagccggtaacgccaccacataaattcttgcttcttgcaagaagcc

SEQ ID NO: 1034 - DNA, 174 bp, Artificial Sequence
  Description of Artificial Sequence: Synthetic polynucleotide
gtgggtgtggttgtgcatttcagtcgtgctcatctttgtggtgagtatgttgctattatgttgttgttctactggttgctgtggcttctttagttgttttgcatcttctattagaggttgttgtgaatcaactaaacttccttattacgacgttgaaaagatccacatacagta

SEQ ID NO: 1035 - DNA, 174 bp, Artificial Sequence
  Description of Artificial Sequence: Synthetic polynucleotide
aattccctcagctactgtggcaatcgtggtgggagtgattgcgggctttgtaactctgatcattgtcttcatatgctacatctgctgccgcaagcgtcccaggtcatacaatcatatggtagacccactactcagcttctcttactgaaactcagtcactctcatttcagaacc

SEQ ID NO: 1036 - DNA, 174 bp, Artificial Sequence
  Description of Artificial Sequence: Synthetic polynucleotide
ttgtagatctctcacgcattttagtgtcatgaattagtgtttcaaatcagttgcatatcaattaagaaaaacttaggagacaggtatagaacctctctttcagataactggtcaattaaggacagaaattctgtttctcaaatccgctagcctttgtcaaagaggacacaagca

SEQ ID NO: 1037 - DNA, 233 bp, Artificial Sequence
  Description of Artificial Sequence: Synthetic polynucleotide
tgtgtgcccgtctgttgtgtgactctggtaactagagatccctcagacccttttagtcagtgtggaaaatctctagcagtggcgcccgaacagggacctgaaagcgaaagggaaaccagaggagctctctcgacgcaggactcggcttgctgaagcgcgcacggcaagaggcgaggggcggcgactggtgagtacgccaaaaattttgactagcggaggctagaaggagagag

SEQ ID NO: 1038 - DNA, 174 bp, Artificial Sequence
  Description of Artificial Sequence: Synthetic polynucleotide
accgttgatcgggaaatgttcggatggtgtggttatgcacgtaaagaacattttgtagtgatgtaataaaatgttggcgccaaaaaaatacagtatataatgtgttggtcatttcatttgttttttaaagcacataaggcgcgagttggtgctaggacttcgttcttgacagag

SEQ ID NO: 1039 - DNA, 174 bp, Artificial Sequence
  Description of Artificial Sequence: Synthetic polynucleotide
ctaataaattaagaaaaacttaggacccaagtcctttaaacgtgcatgattgagatagtcagaaattggagctaatttgaatactagtgagtaaattaggagtagtagtattgaaccacctcatatcttatttcttctgaactgcattaaaatttgtacccaggatataacaac

SEQ ID NO: 1040 - DNA, 174 bp, Artificial Sequence
  Description of Artificial Sequence: Synthetic polynucleotide
gcgcggactaaaaacagggatgtactactgcaaggttcgcaaggcgaccaacagcggggtctttggcggcgacgacaacattgtctgcatgagctgcgcgctgtgaccgacaaaccccctccgcgccaggcccgccgccactgtcgtcgccgtcccacgctctcccctgctgcc

SEQ ID NO: 1041 - DNA, 174 bp, Artificial Sequence
  Description of Artificial Sequence: Synthetic polynucleotide
aaaacagtgggtagaaaagatatttttacaggcgatttgttgaaccttttttattgttcagcttgctttgtaatttttttctaaagaaaatttgcagcttctaaatgtgctaaataaaaaaaaattgaaatatttatgcctttgttttttcttgggtaattttaaaactgaagc

SEQ ID NO: 1042 - DNA, 174 bp, Artificial Sequence
  Description of Artificial Sequence: Synthetic polynucleotide
gctctgacattgggacatttgatgtaaccggacctggttcagtatccgggttgtcctgtattgttacggtgtatccgtcttggcacactgaaagggtatttttgggtaatcctttcctactgcctgatagggtggcgtgcccggccacgagagattaagggtagcaatttaaac

SEQ ID NO: 1043 - DNA, 174 bp, Artificial Sequence
  Description of Artificial Sequence: Synthetic polynucleotide
aaactaattatagatatttacacactacaataaaaggatttgaatttccaaatccttttcctatgaaagcagataatacacctcagttcgaactaactgaccaaagctggaaatctttttttacaaggctttggacacaattagacctgagtgatcaagaagaggagggcgagg

SEQ ID NO: 1044 - DNA, 174 bp, Artificial Sequence
  Description of Artificial Sequence: Synthetic polynucleotide
atctggagaacatgctagacaattgggagatttcgcgcaccaatcttaagacttgtaaagaactacgtaaagccctcaccgaggcctcgagagcaaggcggaaacaaacaatttataaactgcaaggctcggatataagcctttccgttagtgaagttggagtttttgggcaac

SEQ ID NO: 1045 - DNA, 174 bp, Artificial Sequence
  Description of Artificial Sequence: Synthetic polynucleotide
aacctctactggtggtaaacgtcctaccacttttcctatacctcaacctgttcccatgcagccatatgtaccttttgtaattgtggattcatttatttcttctgatacattttatttgcatccttccttggtacgtaaacgcaaacgacgggaccttgtttaattgtttttcag

SEQ ID NO: 1046 - DNA, 174 bp, Artificial Sequence
  Description of Artificial Sequence: Synthetic polynucleotide
gatgtccacgtttcgaaagacgaaaaattcaatgtatcttgagctcgtttgtctctgtagggtaatcgtttcagagatcttttctgaaattacgctgtacatttttccaggtgacagagggctgtctgctgttaatcacgtcgacgcgaagactagttcaaaataacacttaag

SEQ ID NO: 1047 - DNA, 174 bp, Artificial Sequence
  Description of Artificial Sequence: Synthetic polynucleotide
gtttcctatccagaatctagagtaatacctgctggaggtttaccaactgagccatttgttcctctagaaccagctttgttatctgatatatttagtacggattttgtatatcgtcctagtttatatcgcaagaaacggaaacgattagaaatgttttaattgttttgcaggaac

SEQ ID NO: 1048 - DNA, 174 bp, Artificial Sequence
  Description of Artificial Sequence: Synthetic polynucleotide
aggacagatggaaatatttgcgcagcaggctgacagtgtttacatttaagaatccatttccttttgcaagtccgggagagcccctgtacccgataaataatgcaaactggaaatgctttttccaaaggtcgtggtcccgcttagacctaaacagtccagaggagcaggacgaca

SEQ ID NO: 1049 - DNA, 174 bp, Artificial Sequence
  Description of Artificial Sequence: Synthetic polynucleotide
atatgttttcaaaaaatcgagataaaaaacactttgcttcatccgaaatccaagcaaagggtaaatgtgacattttcatgactcgttttttctgttgagcattattgaacacttcttaaaaaattagtttaatagtctctattttctctttgattagatacatgcgctgccgac

SEQ ID NO: 1050 - DNA, 77 bp, Artificial Sequence
  Description of Artificial Sequence: Synthetic oligonucleotide
cagagagagtaacgcacaatcactactcaaacgacaacagcaaagcgcaatacatacggatctcaactgggcaataa

SEQ ID NO: 1051 - DNA, 191 bp, Artificial Sequence
  Description of Artificial Sequence: Synthetic polynucleotide
gactatgtgatcttattaaaattaggttaaatttcgaggttaaaaatagttttaatattgctatagtcttagaggtcttgtatatttatacttaccacacaagatggaccggagcagccctccaatatctagtgtaccctcgtgctcgctcaaacattaagtggtgttgtgcgaaaagaatctcacttcaa

SEQ ID NO: 1052 - DNA, 174 bp, Artificial Sequence
  Description of Artificial Sequence: Synthetic polynucleotide
tgtgggttcttttgtcatggttcctggcggggaagtggccgcgctggtccgtgcagacctgcacgattatgttcagctggccctgcgaagggacctacgggatcgcggtatttttgttaatgttccgcttttgaatcttatacaggtctgtgaggaacctgaatttttgcaatc

SEQ ID NO: 1053 - DNA, 174 bp, Artificial Sequence
  Description of Artificial Sequence: Synthetic polynucleotide
ttgtatcgaatagtaaacttaccagacgtcagccaatcagagagggtctcgcgtctctacagtcgtccgagtatggagaaaaacttttacatgaccttagagagttgttcttgatcaattctactgcggatctggataaagatacatcatctctctttcatatgtgatatagta

SEQ ID NO: 1054 - DNA, 174 bp, Artificial Sequence
  Description of Artificial Sequence: Synthetic polynucleotide
gcgtaagtctgggacggaaccgactactttgggtgtccgtgtttcctgttttacttactttggctgcttatggtgacaatctagtgttgttaccatatagctattggattggccatccggtgttttgaattgtgtgtttatactaattcttttacatatcacagacaaccaaat

SEQ ID NO: 1055 - DNA, 174 bp, Artificial Sequence
  Description of Artificial Sequence: Synthetic polynucleotide
cgcccacggtctggccgtcatcgtcgcgggtaaccaaacctggtacgtgaatccgtttagcctggctcacctgctggatgcaatatataacgttttagggatcgaagacctgagtgccaacttttggcgccaactggctccttaccgtcacactctcatcgtgccgcagacttg

SEQ ID NO: 1056 - DNA, 174 bp, Artificial Sequence
  Description of Artificial Sequence: Synthetic polynucleotide
gcattacgaacaaagggtgcaggtaagcttgtttggggaaagtgaaaactcccagaagcattaatcatgtgactaaacacgcccattgcggggttgggtgagcctataaattctacaacattggcggaagatacaggcaactgcaaacacgcaattgtcagatattttgcagcc

SEQ ID NO: 1057 - DNA, 174 bp, Artificial Sequence
  Description of Artificial Sequence: Synthetic polynucleotide
agagtccgtgcgtggatgtcacggcggagcatatgagtcaattcttgcagtggtgccggagccttaaaaagaggttcaaggagagctacttcttcaactgtcgcccacggtttgagcaccctcatcttccaggtctggtagctgaactcttggcagacgacttctttggtccag

SEQ ID NO: 1058 - DNA, 174 bp, Artificial Sequence
  Description of Artificial Sequence: Synthetic polynucleotide
cgaggtatcatttcgaaagacgaaaaattcaatgtatctcgagctcgtttgtctctgtagggtaatcgtttcggagatcttttctgaaattgcgctgtacatttttccaggtgacagagagctgtctgctgttaatcacgtcgacgcgaagactagttgaaaataacgcttaag

SEQ ID NO: 1059 - DNA, 174 bp, Artificial Sequence
  Description of Artificial Sequence: Synthetic polynucleotide
aagtgctcttcctcacctgcccctgagtcactaccggttggggtaagaactgagggggcaaagtcatcaatctcagcgtaaaagttttcgtgtctttcgttttcaggggactcatcctcctgacattttcgccagccgccgggcgggccggcctcctttcctggaaatccagcc

SEQ ID NO: 1060 - DNA, 174 bp, Artificial Sequence
  Description of Artificial Sequence: Synthetic polynucleotide
tggccctaccgctacccctctttcaacccctcaccatcacccaacccgctgccccacccacatcccccccaccgccaccgctaccgtcacctctgaacttcacctttttcctccatctcgccccacttctctctacatttctccgcccctctattcttactcctgttttctagg

SEQ ID NO: 1061 - DNA, 174 bp, Artificial Sequence
  Description of Artificial Sequence: Synthetic polynucleotide
ccgagaatgtaacgggggtgtaaatagccagggggtttgttttaatttattaataaaaatgtgtattacgttactcatgtgtctccattacgcatcacagggggtatttatacccgataatatacaaaacgcgttttgtacctctaccgcacccgatatcttaacggggttatt

SEQ ID NO: 1062 - DNA, 174 bp, Artificial Sequence
  Description of Artificial Sequence: Synthetic polynucleotide
ctcccaaaggagggatatgtggttctggtaggagacgagaacctaaaacagttcccgcctccgtctgaatttttgctttcggtttggaaccgaagccgcgccgcgcgtcttgtctgctgcagcatcgttctgtgttgtctctgtctgactgtgtttctgtagttgtctgaaaat

SEQ ID NO: 1063 - DNA, 174 bp, Artificial Sequence
  Description of Artificial Sequence: Synthetic polynucleotide
tcatcatcttcctcacctgcccctgagtcactgccggttggggtaagaactgagggggcaaagtcatcaatctcagcgtaaaagttttcgtgtctttcgttttcaggggactcatcctcctgacattttcgccagccgccgggcgggccggcctcctttcctggaaatccagcc

SEQ ID NO: 1064 - DNA, 174 bp, Artificial Sequence
  Description of Artificial Sequence: Synthetic polynucleotide
gagtccccgcattctgccggggtaaaatccacggcgcgtttgttgaccatgttcagttgaacgactccgcccccgcgaatagctacggccgcttgccagtccccatcggcattccggttggtgctgtccgtctggacaaggatcgccctgggcccccactgactcatcgccgcg

SEQ ID NO: 1065 - DNA, 174 bp, Artificial Sequence
  Description of Artificial Sequence: Synthetic polynucleotide
tatgcgcagacgcatgaagggtggggtgctgcccttcctaattccacttattgctgcggccattggagccgttcccggaattgcctcagtagccttgcaggcttctcgaaaaaattaaaataaaataaaacttccaacttattactggtactatgactgttttatgcagactaa

SEQ ID NO: 1066 - DNA, 549 bp, Artificial Sequence
  Description of Artificial Sequence: Synthetic polynucleotide
caaaattgcgtgcgagaaagcacgcaaatcaaagtctagtgcgtaattcactcactaccggcgtaatttgtggttatgctattgcgttgagagtgttgtgggcgtagtacgggggcttttggtttgtgtgtgattaatatgcattcccagttttgtttagttttagattactgatttatttttcgaactacccgaatttatttaggctcttcgagaaataatgatgaactgtcctcaacaagtatgaaaagcaattatttgtgaagttacttgttgttgtaagattattgacctcttagatttttctaagttgtaatgctttgttttctgattgactagattatgaatccaattaaaaggagtagtggtctaatatagtctgtgtgacctgcaggcattttgtgaaaagggtaaagtatgaaagctactctcagaaaagtacttatgtattgatgagagccttaaaatgactttatattcacaaaactgctggaagacaatgatctggggtatcacattccctcttaggttaagtttcgcactactagg

SEQ ID NO: 1067 - DNA, 174 bp, Artificial Sequence
  Description of Artificial Sequence: Synthetic polynucleotide
aaaaaaaagagctcagaggatttttatttttattttagagcttttgctggaattttgtagaggtgaagacagtgtagacgggaaaaacaaaagtaccactgctttacctgctgtaaaagactctgtaaaagactcctaggtaagtaatccctttttttttgtatttccaggttc

SEQ ID NO: 1068 - DNA, 174 bp, Artificial Sequence
  Description of Artificial Sequence: Synthetic polynucleotide
cgtgtttcctgttttaacttttatggctgcttatggtgacaatttaacattgttaccatatagctgttgggttggccatccggattttgttataaaaccatttcctcgtgccttgacctttaacacatttgtgaacttctttaaatcccttttattagtccttaaatactaaga

SEQ ID NO: 1069 - DNA, 174 bp, Artificial Sequence
  Description of Artificial Sequence: Synthetic polynucleotide
ttggtagtaatggggtcagtgtacttgagtgctaaaactcccggggggttttcctgtaacccgtcggaagaaacgaagggcggagctacatagggaatgctgggagttgaggaggtgtcataggggtagacggggttgaagtcgtcttcaattctggttcttttcatctgcaag

SEQ ID NO: 1070 - DNA, 174 bp, Artificial Sequence
  Description of Artificial Sequence: Synthetic polynucleotide
cttgggttgtagatatagtcaatcaactggtctgacaagtcataccccaaacaatccaaatctggaatcacctgttcgctcagtagtaatatcttggcaaacactacactaacctcgtctgtactgtctgaaagtggtcaggattgattgacagttattatttatctttaagca

SEQ ID NO: 1071 - DNA, 174 bp, Artificial Sequence
  Description of Artificial Sequence: Synthetic polynucleotide
gtgtctggaaacttgctctacccgtagctaacgtgacatatgccctgttcattgtaattgtactggtagttgtattaggggcggtgcttttctggaaataaattgcctttccgtacatatcctgcgcagatgtacgtgtatgctgttatcgattgtcccgtaaactaataaacg

SEQ ID NO: 1072 - DNA, 174 bp, Artificial Sequence
  Description of Artificial Sequence: Synthetic polynucleotide
aagacaggtggaaatttttacgtagtagactgcagctgtttacctttcctaatgcatttcctgtaaatcagaaaggggatcccttgtatacactaaatgatgcaaactggaaatgcttcttccaaaggttgtgggctcggttagacttacacgagcaggacgaccaggaggaca

SEQ ID NO: 1073 - DNA, 174 bp, Artificial Sequence
  Description of Artificial Sequence: Synthetic polynucleotide
tgggactttgtccccattgcattaatgtaggggcttggtataatggatggaaatttcgagaatttaccccagatttggtgcgatgtagctgccatgtgggagcttctaatcccttttctgtgctaacctgcaaaaaatgtgcttacctgtctggattgcaaagctttgtagatt

SEQ ID NO: 1074 - DNA, 174 bp, Artificial Sequence
  Description of Artificial Sequence: Synthetic polynucleotide
gcagagacatctttaaaatatttacatagtagactaacaggatataattttccacataaactaccagtagatagtaatggcaatgtagtgtacaagatcactcatgcagattggaaatgttttttagcaagctggagcagcagttagacctgtgtgaaccagaggacagtacag

SEQ ID NO: 1075 - DNA, 174 bp, Artificial Sequence
  Description of Artificial Sequence: Synthetic polynucleotide
aggctacacagtgtcctatcccgagtctagacaaaccacagatataatttttccacatcctgacacccccacagtagtaatccacatcaatgatacatcaggagattattatttacacccaagtctccaaaggaaaaaacgcaaacgcaaatatttataattttgtttttgcag

SEQ ID NO: 1076 - DNA, 174 bp, Artificial Sequence
  Description of Artificial Sequence: Synthetic polynucleotide
cctactgggaaaagtagggaaatacccttcacaggacgaaaaggcgctgctgggggacaggaggagggttcgcagccctgagacttaaagaaggggacgagccctccgcctgaacctgaggagtgcaaaggcagcgctagtaagaaaaccgccgtggtgaatctagatagagac

SEQ ID NO: 1077 - DNA, 174 bp, Artificial Sequence
  Description of Artificial Sequence: Synthetic polynucleotide
ctcagcctgcatatacgatcaaaaggaggatggcccccgctggctccctgagcgactaattagacacatcaataatcagacagcccccttgtgtgacaggccaagtaacccaaatacagccccagggccaaaaggctcgccctgaggagctccttttctcttcttccaggaaga

SEQ ID NO: 1078 - DNA, 174 bp, Artificial Sequence
  Description of Artificial Sequence: Synthetic polynucleotide
cggaggcctctttaaaatacctgcagagtagaattacaagttttaagtttccacataaacttccattagatacaaatggaaatccaatatttattataactgacacagattggaaatgtttttttagcaagctggagcagcagttagacctttgtgacccagaagacagtacaa

SEQ ID NO: 1079 - DNA, 174 bp, Artificial Sequence
  Description of Artificial Sequence: Synthetic polynucleotide
tggatattacatatcatatccagaaacaaggaatattccagaagttatatacactgagccagacacgactccaacaataataattcatacagaggatttcagtggtgattattatttacatccaagtttgagacgaagaaaaagaaaacgagcctatttgtaatttttttgcag

SEQ ID NO: 1080 - DNA, 174 bp, Artificial Sequence
  Description of Artificial Sequence: Synthetic polynucleotide
ggaaatttccaataaactctggtgtaaggcttagagtgatggtcgaggtgccctatttagggtgaggagcctcggtggcagccccaccaaatcctctattggataggaacagctgtactgggcagttacagcagtcgtatggtaacacatgcggcgttccgaaataccatgcct

SEQ ID NO: 1081 - DNA, 518 bp, Artificial Sequence
  Description of Artificial Sequence: Synthetic polynucleotide
ctgctagacttcgccacgcttacaccattgagaacacataggtggtgtaatattatgtgtttggctgcgtgtgtcacgagcacgatctatgggggaatctaacccaggtggtgttgtgtatgatgaggtacaagcccgtcaacaccacaggtggagagggacaggagtctcatttcccctccaaaaaacagcagtggtccgcccctcatgccctatgaaacattagggggccgacactagtgggcaagcccgatggtgtgggggactggatatgggaaccccagtccgttaaacccgtacggcttcgccagcctacaccggggggggcttaatccccttattttggcacctgaaaatattacttttgacactttaaacacacacaatgatcacgaggagacccatggagagtctccagaggttcctaaggcctcgatcgcgcctgccgggaggcagaatgtcccggttctccaacaaaatcaagaaaacgaagataatcacgcgctgggcggtagcga

SEQ ID NO: 1082 - DNA, 174 bp, Artificial Sequence
  Description of Artificial Sequence: Synthetic polynucleotide
catcccacacaaagtacacaacaagcgttttgaaccacgttctatagacgaacgtgtcattcttggaggacttcatgattgcgatggtctcagttgagcattcaccttttaaataatttgcaaagggcgtgaccggatgttttaaagggtccagtcctcctcagatctcaaaca

SEQ ID NO: 1083 - DNA, 174 bp, Artificial Sequence
  Description of Artificial Sequence: Synthetic polynucleotide
accgtgtttttcacctaaatttccgcgtacggtgtcaaagtcctgtgtttttacgtaggtgtcagctgatcgctagggtatttaaacctgacgagttccgtcaagaggccactcttgagtgccagcgagaagagttttctccttcgcgccgcaagtcagttctgcgctttgaaa

SEQ ID NO: 1084 - DNA, 691 bp, Artificial Sequence
  Description of Artificial Sequence: Synthetic polynucleotide
gccccggacctcccaccgaggtggggggaaaggggccctggaccggccgggtggaaggcccggaaccggtccatcttcctcaaggttgaggaaggggtacgtctatcggtccggtcggtccgaaaggcgtctggatgcctagtgttagggttcgtaggtggtaaatcccagctaggcgtgaaagcgctataggataggcttatcccggtgaccgctgccccggaaccagccccgcggktctttggacacggtccacaggttgggggtaccggtgtgaataaccccccgactgaagcgtcagtcgttaaacggagacggtctcctgagatcgcaacgacgccccacgtacgggaacgccgccaaaaccttcgggacagctatgcgggttgacaatcccagtggggggccggggaccagctgattacttgtcctgcgagttcctcttgagactggccgaaaggcagccacggggccaccaaggcggcgcagcgctgcatgcggcaaggggaaaaatccttcgggtgacccctggtggcaatcccttcccttaggagcatgagtgtggtcgacacattcaccatggcttggctgtggttgctggtttgcttccccctcgcggggggggtgctcttcaactcgcggcaccagtgcttcaatggggaccattatgtgctttccaattgttgttccc

SEQ ID NO: 1085 - DNA, 184 bp, Artificial Sequence
  Description of Artificial Sequence: Synthetic polynucleotide
aattactaatttgatctttaggttataatgttaggactataaaaattagcttaatgcatttagtaatttaaggcttagttatttaactttacttatcaagatggccgttggcagccccacgaaatctagattagtccgaatgtcctattttgattaggtggtcagataggtcagaaactcacct

SEQ ID NO: 1086 - DNA, 174 bp, Artificial Sequence
  Description of Artificial Sequence: Synthetic polynucleotide
cattggacggtagcagatgaagaattgttaaaaaatataaaaaatgaaacagggtttcaagcacaagcagtaaaagattactttactttaaaaggtgcagctgcccctgtggcccattttcaaggaagtttaccggaagtgcccgcgtacaacgcctcagaaaaataccccagc

SEQ ID NO: 1087 - DNA, 174 bp, Artificial Sequence
  Description of Artificial Sequence: Synthetic polynucleotide
cagaagccccattaaaatatttacatagcagaattcaagaatacaaatttccaaataaattgcgtttagatgcaaatggaaatccaataataacaattactgatgcagattggaaatctttttttagtaaactgtggaagcaattagacctgggcgatccagacgacagctcag

SEQ ID NO: 1088 - DNA, 174 bp, Artificial Sequence
  Description of Artificial Sequence: Synthetic polynucleotide
tcaactctcaagatccttcctcttcttactttgttccgctcctcgcctagtcccaacacagcaatcaccaaccagatcgaagaaaccgcggcaggtcgacccaactgagcaacatcgactgcaacttcacacaagcctccaactggcctccaacagataccgcaaagaacccaa

SEQ ID NO: 1089 - DNA, 174 bp, Artificial Sequence
  Description of Artificial Sequence: Synthetic polynucleotide
tgaggtggaaaatcgtttttcttttgaccgtaaacctcatatagaaaacggtataattcaacttgtggtttactcttatgtttgatgacgcgtgttatgttacgtcaaacataatatataaggatttcaccacaaaaccccattatctctgtttctgtgatcaaatccacaaag

SEQ ID NO: 1090 - DNA, 174 bp, Artificial Sequence
  Description of Artificial Sequence: Synthetic polynucleotide
tgaaccatgctctttatgttttaaattttttaactttagatgcggaaggtaattcagccgcccagcgtttttggggagaacgatcctcatgtaaaaaaccacttgtacgatggaaggatccacttaccaatctgtggtatggaccagaccctgtattgatatggggacgagggc

SEQ ID NO: 1091 - DNA, 174 bp, Artificial Sequence
  Description of Artificial Sequence: Synthetic polynucleotide
cctagaggacgtctggcctgtagctgcgtctgctgtgagtacaatcgggaccttactggagaaagctgcaggaactctcttcgggaatgttttcagcatactagcctatgctaaaccggtcattattgggataatacttatcattttacttttgttagtcatcagaatattgag

SEQ ID NO: 1092 - DNA, 174 bp, Artificial Sequence
  Description of Artificial Sequence: Synthetic polynucleotide
gccattgtaactgtaacatatgatagtgaggaacaaaggcaacagtttttagatgttgtaaaaataccccctaccattagccacaaactgggatttatgtcactgcacctattgtaatttgtatatatgtaaatgtgtaaatatatggtattggtgtaatacaactgtacatgt

SEQ ID NO: 1093 - DNA, 174 bp, Artificial Sequence
  Description of Artificial Sequence: Synthetic polynucleotide
gctagtattggatgtgcgcgtggaggctttgctggaagccaccgttgagcaccttgaaaatcgcatttcttttgatctagctgtgctttttcaccaacacagtgggggcgagagatgccatctgcgcgatctacaatttgaagtactgcgagatcgtttggaataaaaattaac

SEQ ID NO: 1094 - DNA, 174 bp, Artificial Sequence
  Description of Artificial Sequence: Synthetic polynucleotide
acgagctgtatataaatcggcttgtttttggggcggtttgtacgctgggcacagttccctttgattctcatccggtgcaccaaagtctgaacgtgaagggcacgtccttgcctgtactggtgtttgcgaactttgaggccgcgtgtggcccctggactgtgtttctgtaaggtc

SEQ ID NO: 1095 - DNA, 174 bp, Artificial Sequence
  Description of Artificial Sequence: Synthetic polynucleotide
ggtagtgtgtcccccccccctccaaccaatatggctgtcgtgtgtggttccgggttgcgcctccgtcctttccaccccccttccccctccttttttgttttgcgtgcgcttataagagcgggcccggggcccttcgcagcttcaccgagagcgccgtcgggccccgggtgcggg

SEQ ID NO: 1096 - DNA, 174 bp, Artificial Sequence
  Description of Artificial Sequence: Synthetic polynucleotide
tgtttttttttttgttaacagtgtctgttttttttcttaaggtgcttttagagattatgccacacccatttccggagttgcagtattttttcgtataaatttaactaagattgtgcagttcttacatatttggatggccgattatcttaatcattaacgagaaaaaacatcgta

SEQ ID NO: 1097 - DNA, 174 bp, Artificial Sequence
  Description of Artificial Sequence: Synthetic polynucleotide
ggcagaagcacagcattttcttgtgagcttcgagcactaataaaactgaaaatcaaaatgtccaacatggatattgacagtataaataccggaacaatcgataaaacaccagaagaactgactcccggaaccagtggggcaaccagaccaatcatcaagccagcaacccttgct

SEQ ID NO: 1098 - DNA, 174 bp, Artificial Sequence
  Description of Artificial Sequence: Synthetic polynucleotide
gatacaatattaagtgatgattctcttaaacagtcagagttaattaacaacgatttggcgtggataattttaataatctccagtgtcctgcttttcgttataatagcttcaacccttctgtgtaaactaggaactcatcaacattgaaaattttgaaagcttcagtacttgaat

SEQ ID NO: 1099 - DNA, 174 bp, Artificial Sequence
  Description of Artificial Sequence: Synthetic polynucleotide
cagtggcccctaacacaagaaaaactttctgccgcacaacagctggtgcaggaacagctgagacttggtcatattgaaccttctacttctgcttggaattctccaatttttgttataaaaaagaagtctggtaaatggaggttgttacaagatctccgtaaggtaaatgagacg

SEQ ID NO: 1100 - DNA, 174 bp, Artificial Sequence
  Description of Artificial Sequence: Synthetic polynucleotide
attgtgatgtatgcagagatccaacgtttatgtacttaaggagtagattaacatgttttaactttccaaataagttaccattgtatgaaaatggagaaccaaaatttaaatttactgataattgctggacgtctttttttagcaagttttggaagcacttagatttacctgaag

SEQ ID NO: 1101 - DNA, 174 bp, Artificial Sequence
  Description of Artificial Sequence: Synthetic polynucleotide
aagtgcgcgcggcgcgttgtcctcgcaccgggctttggatcgtccgtgatcgccgcggacgcctgcgacgttggctctcgcagcccgaggtgtgcgtgctctacgtcacgccagacttggacttttactgggtgctgccgggcggctttgccgtctcttcgcgcgtcactcttc

SEQ ID NO: 1102 - DNA, 174 bp, Artificial Sequence
  Description of Artificial Sequence: Synthetic polynucleotide
gtctacttagaggggtatgtgattctggtaggggacggaaggctaaaacggtttccgcccccgtctgaatttttgctttcggtttggagccgaagccgcgccgcgtgtcttgtctgctgcagcatcgttctgtgttgtctctgtttgactgtttttctgtatttgtctgaaagc

SEQ ID NO: 1103 - DNA, 174 bp, Artificial Sequence
  Description of Artificial Sequence: Synthetic polynucleotide
tacaatctggccctgatataacttttcctactgcacctatgggaacaccctttagtcctgtaactcctgctttacctacaggccctgttttcattacaggttctggattttatttgcatcctgcatggtattttgcacgtaaacgccgtaaacgtattcccttatttttttcag

SEQ ID NO: 1104 - DNA, 174 bp, Artificial Sequence
  Description of Artificial Sequence: Synthetic polynucleotide
ccgctcccagcgatcccagcgtaagcgcacggcgagatcgcgagcgagggcgaccagctcgggttcccccgagaatttcatgaccagcatgaaggggacgagctgcttgccgaaggaccccatccaggtgtaggtttctacatcgtaggtgacaaagagccgctccgtgcgagg

SEQ ID NO: 1105 - DNA, 174 bp, Artificial Sequence
  Description of Artificial Sequence: Synthetic polynucleotide
tacaatataatgacaatgtccaggtagtcctcattcttctcatagtagttggcttaataataatttccgctagtttaatattgctttattgccaccgcaaaaaaatcaaggccaaagttcaacatcaaccagtgcatatttgtttagaaaaataaaaatttttttcttttcagt

SEQ ID NO: 1106 - DNA, 174 bp, Artificial Sequence
  Description of Artificial Sequence: Synthetic polynucleotide
gggaagctcacgtggacgagattacatcgtccgacaaaagttccgtcggatccatattgagaatttgttgccaaaacaaatcgtccggatgtgcagacatctagaggtgacaagccaggggaattaccttattttccgtatacaactataaaaaacttgggaggcgcaaacggt

SEQ ID NO: 1107 - DNA, 174 bp, Artificial Sequence
  Description of Artificial Sequence: Synthetic polynucleotide
caggtaacctgggggatacggacggagaggactccaagtcagaagcatcggaagtggattattgtccacccaagaaaaggcgtgtgatttcagcaactccaccaaacagtccagtaagtggtccaagcctttctacctttttagatacttggcaatcacaacctagagacgacg

SEQ ID NO: 1108 - DNA, 174 bp, Artificial Sequence
  Description of Artificial Sequence: Synthetic polynucleotide
gaatatccggcacttctgacgcttgtcttagtcattatagcctcagccatctacctgatgtacgtctgctttaacaagtttgtgaacacgctgctgacggattagatggggatatttaaaaggggcagcaatctcggctgtctgtacttcttctctgctcgttaaaccaatagc

SEQ ID NO: 1109 - DNA, 174 bp, Artificial Sequence
  Description of Artificial Sequence: Synthetic polynucleotide
accagttaggagggatatgtggttctggtaggagacgagaacctaaaacagttcccgcctccgtctgaatttttgctttcggtttgggaccgaagccgcgccgcgcgtcttgtctgctgcagcatcgttctgtgttgtctctgtctgactgtgtttctgtatttgtctgagaat

SEQ ID NO: 1110 - DNA, 174 bp, Artificial Sequence
  Description of Artificial Sequence: Synthetic polynucleotide
gtacacagaaacgcaaggattcagacgcatccgaacatgatcagaactcaaaatcaaaagcgtcagtggaaaaaaaccaacccctttaaacacgttttacaaatttttaactaataaatgctacccacatgaaatcacgtactatctttttctgtgttttatcttccatagagc

SEQ ID NO: 1111 - DNA, 174 bp, Artificial Sequence
  Description of Artificial Sequence: Synthetic polynucleotide
acctagtgtatcctcggggctgtaatataatcagccatttaacacataacaagccctactgttttcttgttttgccgtgcatttagaataagagacaacttaaacctccgattcggcaacacagggaataatctcaccagacccggcagtgtcttcaggcttcatagccccaag

SEQ ID NO: 1112 - DNA, 174 bp, Artificial Sequence
  Description of Artificial Sequence: Synthetic polynucleotide
ttgatggtttatatttaacgattattggaaaaattaaatgttcactagggttcttacataagatatttactatcacgtgcgcggggtcatattccgttgcaaacacagtaatagtcattgtgaatgtctttcagtttatcttccaacagcttttaatataagacaataggaatc

SEQ ID NO: 1113 - DNA, 174 bp, Artificial Sequence
  Description of Artificial Sequence: Synthetic polynucleotide
ccctgccacagcattcacagtatatgtattttgttttttattgcccatgttactattgcatatacatgctatattgtctttacagtaattgtataggttgttttatacagtgtattgtacattgtatattttgttttataccttttatgctttttgtatttttgtaataaaagt

SEQ ID NO: 1114 - DNA, 174 bp, Artificial Sequence
  Description of Artificial Sequence: Synthetic polynucleotide
cagatgtgcccaagcctggatgttgactccattatcccccggacaccagatgttttacacgaggatctcttaaatttctaactcccgttattgaaaccacgcctgcttcacgcctcgtttactaatggaatattaataaatatcttcctgtcggctctctttgaagtggttgcc

SEQ ID NO: 1115 - DNA, 741 bp, Artificial Sequence
  Description of Artificial Sequence: Synthetic polynucleotide
ttaaaacagcctgtgggttgatcccacccacaggcccattgggcgctagcactctggtatcacggtacctttgtgcgcctgttttataccccctcccccaactgtaacttagaagtaacacacaccgatcaacagtcagcgtggcacaccagccacgttttgatcaagcacttctgttaccccggactgagtatcaatagactgctcacgcggttgaaggagaaagcgttcgttatccggccaactacttcgaaaaacctagtaacaccgtggaagttgcagagtgtttcgctcagcactaccccagtgtagatcaggtcgatgagtcaccgcattccccacgggcgaccgtggcggtggctgcgttggcggcctgcccatggggaaacccatgggacgctctaatacagacatggtgcgaagagtctattgagctagttggtagtcctccggcccctgaatgcggctaatcctaactgcggagcacacaccctcaagccagagggcagtgtgtcgtaacgggcaactctgcagcggaaccgactactttgggtgtccgtgtttcattttattcctatactggctgcttatggtgacaattgagagatcgttaccatatagctattggattggccatccggtgactaatagagctattatatatccctttgttgggtttataccacttagcttgaaagaggttaaaacattacaattcattgttaagttgaatacagcaaa

SEQ ID NO: 1116 - DNA, 174 bp, Artificial Sequence
  Description of Artificial Sequence: Synthetic polynucleotide
ggcggcgagggcgcgacccacgcctcgaccggggtcctcacaaacacagaatctgtagacttggctggcctcatggtctcgtcaggccagctcacgggcttcaggcttatatgataaaatgggcgtggcagaatagtataagacgcgaggcctgggtgaggagagtccagagca

SEQ ID NO: 1117 - DNA, 174 bp, Artificial Sequence
  Description of Artificial Sequence: Synthetic polynucleotide
cattcttaacatctggtcctgacatagtgtttccttctgttcctgcaggtacaccatatttgcctgtgtcaccttctatacctgccatatctgtactgattcgcggtactgattattatttgaatcctgcatactatttcagaaaacgccgaaagcgcatattagcatattagg

SEQ ID NO: 1118 - DNA, 174 bp, Artificial Sequence
  Description of Artificial Sequence: Synthetic polynucleotide
gttggcattgggtgacattataaaaggtaaccgagctgacgcgggccctgacgctctccgcgggtgtttccatcattgtttgagatctgaggaggactggaccctttaaaacatccggtcacgccctttgcaaattatttaaaaggtgaatgctcaactgagaccatcgcaatc

SEQ ID NO: 1119 - DNA, 174 bp, Artificial Sequence
  Description of Artificial Sequence: Synthetic polynucleotide
taacacaaccccacgcccttctaatacataaagtgtaatcacgtgatttgttgtggtttccgcatatgtaatacccgtttaaaagcctctcttcttaatgtatcgacagactgggttttgggtggtcatttgaccctgccaacaaccccccattattacgagtacttcaccaaa

SEQ ID NO: 1120 - DNA, 174 bp, Artificial Sequence
  Description of Artificial Sequence: Synthetic polynucleotide
gttagacctagggttagggttagggcctagggttagggttagggttaatacccccctttttttaacccccccggggagtttaaagtaatttttgaaacgcgaggaatatctgtcttccagagcaacagtatcgcacaaaaaagtgtcccggcccgagcgcagtccgacttcccg

SEQ ID NO: 1121 - DNA, 174 bp, Artificial Sequence
  Description of Artificial Sequence: Synthetic polynucleotide
gaacctggcccctgctattgttcccggggggcttctggctaagcagtttggtgataatatgagagagtatctacaactagaacttagagaagaacttagagccaagggcatgtcaattgatgatgccattcttaatttgctacaggtgacacaggagcaagatattttgtcatt

SEQ ID NO: 1122 - DNA, 174 bp, Artificial Sequence
  Description of Artificial Sequence: Synthetic polynucleotide
ctggcccaaacggaggatcctaggtgggtgtgcatttattagacgttggtgtgttgaaggacggatcaggcggggaggaggggtgggggagacttactgcagcactaggttaggttgaaagccggggtaaaaggcgtggctaaacaacacctatactacttgttattgtaggcc

SEQ ID NO: 1123 - DNA, 174 bp, Artificial Sequence
  Description of Artificial Sequence: Synthetic polynucleotide
aacaaaggacgtctggccagcagcagcttctgctctacaaggaattggtaactttttatctgggactgcccaaggaatatttggaactgcctttagtctcttgggatacttaaagcctatcctaataggagtaggggtcattctcttggttattcttatatttaagattgtatc

SEQ ID NO: 1124 - DNA, 174 bp, Artificial Sequence
  Description of Artificial Sequence: Synthetic polynucleotide
ttttttaatcctgtttttttaccattgtattggatatgtgttaagaatgagatgtcctaacggatgggcaagcagccaatgattcttaattcttaaagcgtgtgattcagtatctgtttttataatacggagagctgccgagctgagcggaacagagctttggctgtgacgagg

SEQ ID NO: 1125 - DNA, 174 bp, Artificial Sequence
  Description of Artificial Sequence: Synthetic polynucleotide
gcaagacacctgcaaatcgcagtcgtcgccgtagacgcacaagcaaaccgactcccggcgccctggtgcggcaagtgtaccgcaatggtagtgcggaacctttgacactgccgcgtgcgcgttaccatccgagtatcatcacttaatcaatgttgccgctgcctccttgcagat

SEQ ID NO: 1126 - DNA, 174 bp, Artificial Sequence
  Description of Artificial Sequence: Synthetic polynucleotide
gaaggttatgctgtgtcatatcctgaacgaaggaattatccagaaattatttatcctcaacccgatttgccaactgtaataattcatactgcagatacctctggggacttctatttacatccaagccttcgcaggcgaaaacgtaaacgcacttatttatgatatttctttcag

SEQ ID NO: 1127 - DNA, 174 bp, Artificial Sequence
  Description of Artificial Sequence: Synthetic polynucleotide
cccttgttggagcggtcgcgttttctctgttcccgtcgtgccggttcctaccccccgctccctgggaccgccccctaccccccacctccccgtttgggcctcccccctcgcaccacccctttcctcgtccgtctgcggggagggcgtgtgtaaaaaatcgggcctccggccacc

SEQ ID NO: 1128 - DNA, 174 bp, Artificial Sequence
  Description of Artificial Sequence: Synthetic polynucleotide
taaatgtactataattgttcagtctaaaaataatgttgggtatttataattaccgcccccgtgttacttggaaacacccatacatatgttccactctacatcaaacttctcgcagttttcttgttcccgcacacgtttacacgtccggattcaagtcgcaacgctgctgacaaa

SEQ ID NO: 1129 - DNA, 174 bp, Artificial Sequence
  Description of Artificial Sequence: Synthetic polynucleotide
aagaagttacacaaagaatggacttaagaaatcaacaaagtgtacattcaggagagtttatagaaaaaactattgccccaggaggtgctaatcaaagaactgctcctcaatggatgttgcctttacttctaggcctgtacgggactgtaacacctgctcttgaagcatatgaag

SEQ ID NO: 1130 - DNA, 174 bp, Artificial Sequence
  Description of Artificial Sequence: Synthetic polynucleotide
aatcaatgggaattactaccttagttcagtatgccgtgggaattatgacagtaaccatgacatttaaattggggccccgtaaagctacgggacggtggaatcctcaacctggagtatatcccccgcacgcagcaggtcatttaccatatgtactatatgaccctacagctacag

SEQ ID NO: 1131 - DNA, 174 bp, Artificial Sequence
  Description of Artificial Sequence: Synthetic polynucleotide
taccgttgatcgggaaatgctcggatggtgtggttatgcacgtaaagaacattttataatgatgtaataaaatgttggcgccaaaaaaatacagtatataatgtgttggtcatttcatttgtttttaaagcacagaaggcgcgagttggtgctaggacttcgttcttgacagag

SEQ ID NO: 1132 - DNA, 174 bp, Artificial Sequence
  Description of Artificial Sequence: Synthetic polynucleotide
atgcaaagctacggtatttgcacagtagaatacatgtgttacagtttttaaatccatttccaattgatgtgaatggaaatcctgtataccaattaaataatgcaaactggaaatgtttttttgaaaggacatggtccagattagatttggataacgacgaagacaaggaaaacg

SEQ ID NO: 1133 - DNA, 174 bp, Artificial Sequence
  Description of Artificial Sequence: Synthetic polynucleotide
attcggccgatgatagcagcgtgctggacttgggtgggagaggaaggggcaacccgtttgctcatttgcgccctcgcttgggtggtatgttgtaaaaaaaaataaaaaaaaaactcaccaaggccatggcgacgagcgtacgttcgttcttctttattatctgtgtctagtata

SEQ ID NO: 1134 - DNA, 174 bp, Artificial Sequence
  Description of Artificial Sequence: Synthetic polynucleotide
gcacaatcggtatgaacatcatcctctgcacggactgtatcataatgaaaatgattatccgtaatttattaaatacattaagcaaatactgtctattaagcttcaattttataaacatgttttccagaacaaaaatgcaaacaaggaaatgataacgacgtcattcaaagcgcc

SEQ ID NO: 1135 - DNA, 174 bp, Artificial Sequence
  Description of Artificial Sequence: Synthetic polynucleotide
aaatgaatctaaaccctctacgggaacgatatgaaaaatccgcagaaattagcgatcacattcttgccgctctacgtgatcccaacgtacacgttgtgtattaaagcattgtataaaaacacgcatgcgggcttgctgttctcatttctaggttttgtcttaaatacacccgcc

SEQ ID NO: 1136 - DNA, 174 bp, Artificial Sequence
  Description of Artificial Sequence: Synthetic polynucleotide
cagcaaaggataatagatggccatatttagaaagtagaataacagtatttgaatttccaaatgcatttccatttgataaaaatggcaatccagtatatgaaataaatgacaaaaattggaaatgtttttttgaaaggacatggtccagattagatttgcacgaggaagaggaag

SEQ ID NO: 1137 - DNA, 174 bp, Artificial Sequence
  Description of Artificial Sequence: Synthetic polynucleotide
acgagttcgaggggcgggtctgtatagccctgcgggccctcatctacaccttcaagacgtaccaggtatttgtgccgaagcccaccgcgctggccacatttgtccgcgaggccggcgcgctgctcagacgacactcgatctctctcctgtccctggagcacaccctctgtacct

SEQ ID NO: 1138 - DNA, 174 bp, Artificial Sequence
  Description of Artificial Sequence: Synthetic polynucleotide
tactattctatattggctgcttatggtgacaattgaaagattgttaccatatagctattggattggccatccggtgtcaaacagagcaatcatttatttgtttgttggttttatacctctgaactttaaagtgctaaagactctcaattttatattatatctcaacaaatcagg

SEQ ID NO: 1139 - DNA, 174 bp, Artificial Sequence
  Description of Artificial Sequence: Synthetic polynucleotide
acccgacgccgaaccaccactggaacccgccgccgccgtcgccgtcgccagcccgtgctggccccgatttccgtgcgcagggtggctcgcgaaggaggcaggaccctggtgctgccaacagcgcgctaccaccccagcatcgtttaaaagccggtctttgtggttcttgcagat

SEQ ID NO: 1140 - DNA, 174 bp, Artificial Sequence
  Description of Artificial Sequence: Synthetic polynucleotide
acctgggaccgcaatgtccagggttagtagtcagcggcatcgtcggtgtgctttgtgggttagcagttataatcatctgcatgttcatttttgcttgctgctacagaaggcttcaccgacagaaatcagacccactgctgaacctctatgtttaatttttgattttccagagcc

SEQ ID NO: 1141 - DNA, 174 bp, Artificial Sequence
  Description of Artificial Sequence: Synthetic polynucleotide
caattcagttttagatttaagtaagtttgaatgtaaacataaagccactgttgttgttacacttaaagatagtgatgtaaatgatatggttttgagtttgattaagagtggtaggttgttgttacgcaataatggtcgttttggtggttttagtaatcatttagtctcaactaa

SEQ ID NO: 1142 - DNA, 174 bp, Artificial Sequence
  Description of Artificial Sequence: Synthetic polynucleotide
tactaattttgaaaggcggggttctgccaggcatagtctttttttgtggcggcccttgtgtaaacctgtctttcagaccttgttggacatcccgtacaatcaagatgttcctgtatgttgtttgcagtctggcggtttgctttcgaggactattaagcctttctctgcaatcgt

SEQ ID NO: 1143 - DNA, 174 bp, Artificial Sequence
  Description of Artificial Sequence: Synthetic polynucleotide
aggctgggcggcatgccaagatcgctgagacgtcagttccccgtgacgtgggccctggccagcctgactgacttcctgaaatctttgtaaatgaataaacagtgggtgttgcgtgatgagtaaagtgtaacatttaatgtgggactgggaggccggggcgataccttgggcatc

SEQ ID NO: 1144 - DNA, 174 bp, Artificial Sequence
  Description of Artificial Sequence: Synthetic polynucleotide
agtgtgtccccctccattccacccactgataatacgcccgacaataaagttgatgatattgaattccacacctgcttgtgtttgtgattttatttcatattccatgagagagacctcgcatatttgcagaagggtcactgaaacatcttatcttaaaacagttacacctgaata

SEQ ID NO: 1145 - DNA, 174 bp, Artificial Sequence
  Description of Artificial Sequence: Synthetic polynucleotide
ccagttcaaggtggagtgggcctgtacaatctgttaaagaagcagccggagcggccctcatcccggtaggtactaggcacatctggattccgtggcgtctcctgaaacgaggtgcatgcccaagacccggagacagcgtaaccaccgaatcaaaacacaaagaccttcaactcc

SEQ ID NO: 1146 - DNA, 432 bp, Artificial Sequence
  Description of Artificial Sequence: Synthetic polynucleotide
gtgcaatctgaaactccgcctggtctttccaggtctagaggggtgacactttgtactgtgcatgactccacgttcgatccactggcgagtgctagtagtagtactgctgtttcgtagcggaacacgacggccgtgggactccccccttggtaacaaggacccgcggggccaaaagccacgtctctgacccgtcgtgtgtgcaaacccagcacagcagctttactgcgaaaaccactttaaggtgacattgatactggtactcacgcactggtgacaggctaaggatgcccttcaggtaccccgaggcaacaagcgacactcgggatctgagaaggggactggggcttctgtaaaagcgcccagtttaaaaagcttctatgcctgaataggtgaccggaggccggcacctttccctctactaccactgactct

SEQ ID NO: 1147 - DNA, 174 bp, Artificial Sequence
  Description of Artificial Sequence: Synthetic polynucleotide
attctaggtggccttatttacataatagattggtggtgtttacatttcctaatgagtttccatttgacgaaaacggaaatccagtgtatgagcttaatgataagaactggaaatcctttttctcaaggacgtggtccagattaagtttgcacgaggacgaggacaaggaaaacg

SEQ ID NO: 1148 - DNA, 174 bp, Artificial Sequence
  Description of Artificial Sequence: Synthetic polynucleotide
tatttaatgtaaatgatacttatgatttcatctattttctagttttaggttttctgccaataccggccattatataaggcgggatgttgttgtgttgattacgtcaatacggatggggttttgaatataaagacttacagagcttttaatgaatcattgcttcgtttcttcggg

SEQ ID NO: 1149 - DNA, 174 bp, Artificial Sequence
  Description of Artificial Sequence: Synthetic polynucleotide
gttactagtaagaagttattagttggtgtttcaacgagttttagacgtgtattaggagcggttgctttacacacagttagtgcggtctgcactgcctccgagaaaattttagcatccttttcatttaatttagtcgtttctttataaattgcagctagagcaatatctgtgtcc

SEQ ID NO: 1150 - DNA, 174 bp, Artificial Sequence
  Description of Artificial Sequence: Synthetic polynucleotide
agaccggggaccggtcactaccaaggacgcagacctctttttgagtatcacgcctccggaagtagttgggcaagcccacctatatgtgttgggatggttggggttagccatccataccgtactgcctgatagggtccttgcgaggggatctgggagtctcgtagaccgtagcac

SEQ ID NO: 1151 - DNA, 174 bp, Artificial Sequence
  Description of Artificial Sequence: Synthetic polynucleotide
ccgtgtttttcacctaaagttccgcgtacggtgtcaaagtccggtgtttttacgtaggtgtcagctgatcgtcagggtatttaaacctgcgctctgcagtcaagaggccactcttgagtgccagcgagaagagttttctcctccgcgccgcgagtcagatctacactttgaaat

SEQ ID NO: 1152 - DNA, 174 bp, Artificial Sequence
  Description of Artificial Sequence: Synthetic polynucleotide
ttatgccgagtcatatgcggaagtgatttttttcgcgggcttttggggttttttttgtgttgtgtaggcgaactttggccatttacgtcactatttttcagtattaaaggtgcgcacttgcggcagattgtgtctgctgtgcctggctttgtactgtttttctggtaaggcatt

SEQ ID NO: 1153 - DNA, 174 bp, Artificial Sequence
  Description of Artificial Sequence: Synthetic polynucleotide
cgtaggggtttcctgatattttcttgatgccttttttgaattgaggctatagctcgtccgaatcccgatgaccaggtgacggtcggagatctcgctgaagccgtcttgtatgtgactatttccatctgtttttagtggcgcttcgagttcgttttttctgaagtggatctgccg

SEQ ID NO: 1154 - DNA, 174 bp, Artificial Sequence
  Description of Artificial Sequence: Synthetic polynucleotide
tgcttccttatacaattttgagaggttaataagaaggaagtagtgctatcttaataattaggttaactatttagttttactgttcaggatgcctattggcagccccataatatccaggacaccctctctgcttcttatatgattaggttgtcatttagaataagaaaataacct

SEQ ID NO: 1155 - DNA, 174 bp, Artificial Sequence
  Description of Artificial Sequence: Synthetic polynucleotide
cttgtcctggccttctggtccaggagagggtaaatagacctgcacagttaaggcctaaatggaaaaagcctactcctattttgaaggtattaaatcctaaaactgtggtaatagctggcccaggcggccaggaaagaattgtgtctatagataatctgaagaagacacctcatc

SEQ ID NO: 1156 - DNA, 174 bp, Artificial Sequence
  Description of Artificial Sequence: Synthetic polynucleotide
ccatcaagcaagtgttgtagaataccaggggtttcacaggctgctaaacttactaaattttacataggattatataattcttttcgatacacgttatatctttagcaaagtgaggaaaacagctttatcatgttagatgccagttatccattttaagtgaatcctttcctcaac

SEQ ID NO: 1157 - DNA, 174 bp, Artificial Sequence
  Description of Artificial Sequence: Synthetic polynucleotide
gacgtcacggtaagttgaagaaccttttaacgccaatcaaaatatttttataggctcctcctacctaacattatataaacggtactacgactgtataatgtgtacacataccccaggcaacatttcagatagtaccacgtcacgattgcattgtgtgaatttaacccctcagct

SEQ ID NO: 1158 - DNA, 174 bp, Artificial Sequence
  Description of Artificial Sequence: Synthetic polynucleotide
atccaaagtataaatatctgcatagtagaattaaagcatttgagtttgtaaataagtttccatttaaggacgatggcagtcccttgtttgaacttactgaccaaagctggaaatctttttttcaaaggctttggaggcaattagatctaagtgaccaagaagacgagggtgagg

SEQ ID NO: 1159 - DNA, 174 bp, Artificial Sequence
  Description of Artificial Sequence: Synthetic polynucleotide
gaattgctgggatcgttgcggttgtcgcctttggtggtccgcaaccgcagccagaccgcagtggtggccacggtggtgtctcagacgtcgtgcgtcaaacatgacgtgctgaacttttccttggtataaaattcactcagtggcggcgtagccattgtcttccgttcatccacc

SEQ ID NO: 1160 - DNA, 174 bp, Artificial Sequence
  Description of Artificial Sequence: Synthetic polynucleotide
agctccggtgccagtaattcacaaggagtgaaaacccttgccgctatacgtaaattctgcctgccggacaaaaactgtttcagaaatttcctttctttttctacaacattatttaaggttccctcatcgatagatatatattttctcttcttcacagcttccacagtatccaca

SEQ ID NO: 1161 - DNA, 174 bp, Artificial Sequence
  Description of Artificial Sequence: Synthetic polynucleotide
ctgaagacctgagacccgatcatttggtgcttgcctgcactggagcggagttcggttccagtggtgaagaaactgactaaagtgagtagtgggggcaagatgtggatggggactttcaggttggtaaggtggacagattgggtaaattttgttaatttctgtcttgcagctgcc

SEQ ID NO: 1162 - DNA, 174 bp, Artificial Sequence
  Description of Artificial Sequence: Synthetic polynucleotide
cccctgtcaacagcattggaatttaacttactgtcccccaccagtgtcgccctttgtgatcaatactgaatatttagactataatcccttgcttgcttacggcggtctcgcagctcttattttattcctgatttctaacttgtttctagtgcaacatttgtattcatactaaca

SEQ ID NO: 1163 - DNA, 174 bp, Artificial Sequence
  Description of Artificial Sequence: Synthetic polynucleotide
ctactgcagaggaggagttttgtccgtaccggatagactccaagtgtcacaattgtggctgtcgcataagggtgacagtcgctgcaactgaatttggaatacgttgttttgagcaactgttactgaaagagctttgtttattttgtcctgcgtgctccagacaacttccccgca

SEQ ID NO: 1164 - DNA, 237 bp, Artificial Sequence
  Description of Artificial Sequence: Synthetic polynucleotide
aaattcaaatagttaagatttaattaggattaattaccgatattgtaatcttctattattttatcggtttgaatctcccttacacatatgattatgtagcgtgcttattagtagtagatacatctaaattctacaacgacctaataagttttgattatataagataggatgtgaaggctccgatttgtgaataggtttttatattcgaagtaggtagtattgcgcatactattaatt

SEQ ID NO: 1165 - DNA, 174 bp, Artificial Sequence
  Description of Artificial Sequence: Synthetic polynucleotide
acagtgtgcaatcggttcaccgtaaattatcattgatatctgttatatcctaataagcattcaaaatccaatcctcccctgaataacagcccaatccgcaaagtactttgggtataggtataatccaagttgaattctcaagtagacaactaggcctttgagtatcctgtgatc

SEQ ID NO: 1166 - DNA, 174 bp, Artificial Sequence
  Description of Artificial Sequence: Synthetic polynucleotide
ggaggattacaagtgggaatttgaagagcttttgaaatcctgtggtgagctgtttgattctttgaatctgggtcaccaggcgcttttccaagagaaggtcatcaagactttggatttttccacaccggggcgcgctgcggctgctgttgcttttttgagttttataaaggataa

SEQ ID NO: 1167 - DNA, 174 bp, Artificial Sequence
  Description of Artificial Sequence: Synthetic polynucleotide
catttatttatattaaatactgacactttgcgggttaaaatgtttaatactatttttcaatttgaggttgtatgagataattttgatttctatgttatcattgaataagggagtctggccctaattgatgtacgactcttctttggttgcgacccgagtcccttctacatcaag

SEQ ID NO: 1168 - DNA, 174 bp, Artificial Sequence
  Description of Artificial Sequence: Synthetic polynucleotide
tgctatctatgtggtacatatgtatcgtaatcgagataaataaagtttttaaagttgcaaaagccgtttttattattcccaatgtcgaaaaaaacgtttccatcatttaaattccgcggtgggtgttttaatcttttatttaaggggagcgtggatgtgtcaataaaaaccagg

SEQ ID NO: 1169 - DNA, 148 bp, Artificial Sequence
  Description of Artificial Sequence: Synthetic polynucleotide
gaattcgtcgattcggttgcagcatttaaagcggttgacaactttaaaagaaggaaaaagaaggttgaagaaaagggtgtagtaagtaagtataagtacagaccggagaagtacgccggtcctgattcgtttaatttgaaagaagaaa

SEQ ID NO: 1170 - DNA, 174 bp, Artificial Sequence
  Description of Artificial Sequence: Synthetic polynucleotide
tacaatgagagcttactgtgctgctctttaatcacacggaccaatttttgtatgtccgcaagggccacccagtgggtaccctgctgctaaaaagagtcatttttccttcagtaaaaatagccaccttggtttagtgcatgctttgtgtttttcagactttcatctctactaacc

SEQ ID NO: 1171 - DNA, 174 bp, Artificial Sequence
  Description of Artificial Sequence: Synthetic polynucleotide
ggacggtagtgattggttaagatttggtgtaaggttcatgtgccaacgccctgtgcgggatgaaacctctactgccctaggaatgccaggcaggtaccccacctccgggtgggatctgagcctgggctaattgtctacgggtagtttcatttccaatccttttatgtcggagtc

SEQ ID NO: 1172 - DNA, 419 bp, Artificial Sequence
  Description of Artificial Sequence: Synthetic polynucleotide
gtcttcttgacgagcattcctaggggtctttcccctctcgccaaaggaatgcaaggtctgttgaatgtcgtgaaggaagcagttcctctggaagcttcttgaagacaaacaacgtctgtagcgaccctttgcaggcagcggaaccccccacctggcgacaggtgcctctgcggccaaaagccacgtgtataagatacacctgcaaaggcggcacaaccccagtgccacgttgtgagttggatagttgtggaaagagtcaaatggctctcctcaagcgtattcaacaaggggctgaaggatgcccagaaggtaccccattgtatgggatctgatctggggcctcggtgcacatgctttacatgtgtttagtcgaggttaaaaaacgtctaggccccccgaaccacggggacgtggttttc

SEQ ID NO: 1173 - DNA, 174 bp, Artificial Sequence
  Description of Artificial Sequence: Synthetic polynucleotide
gtaagcgactcccttccgtggtttggtggaaaagtcacaagggtaccatagcgaggaaccccggttcgaaaccggcaggatccgctatgagcacaagtgaggcgcttgcgcgttgaacccggccaaggacccccagacacggagaggagtctttttttatttattttttcttag

SEQ ID NO: 1174 - DNA, 174 bp, Artificial Sequence
  Description of Artificial Sequence: Synthetic polynucleotide
aagggatcagacgtgtattttattagattaacggagtgcatgactatcgcgaaaaggcccagaaaaaggccgagtcgcgagatgtgaagcatgtcgggtgagttgaccacaatgaatttgtacaagtagaatgtgtgactaaaatagtatttgctttttttataggattggacg

SEQ ID NO: 1175 - DNA, 174 bp, Artificial Sequence
  Description of Artificial Sequence: Synthetic polynucleotide
tccggcccctgaatgtggctaaccttaaccctgcagccgttgcccataatccaatgggtttgcggtcgtaatgcgtaagtgcgggatgggaccaactactttgggtgtccgtgtttcctgtttttcttttgattgcattttatggtgacaatttatagtgtatagattgtcatc

SEQ ID NO: 1176 - DNA, 174 bp, Artificial Sequence
  Description of Artificial Sequence: Synthetic polynucleotide
tatgagtgtgttcagtccaataatattaaaggactgtacatttatgcaaacaacagttaccataactcaaatcttgccaggttctaaggaagcaataattttcccagtttacgatataggcaaattattatcagctcttgttttttcagagaacggtgtacttttgaaactata

SEQ ID NO: 1177 - DNA, 174 bp, Artificial Sequence
  Description of Artificial Sequence: Synthetic polynucleotide
ctgttttacgtatgtccatctgcccttccgaggacgaccagtaaccttaccatcatgcttaattgatattaataatcaatgggccattctaggccgagatgtcctccagcaatgccaaagttccctttaccttgcagaccaaccctctcgcgttctaccaatccagacacctag

SEQ ID NO: 1178 - DNA, 174 bp, Artificial Sequence
  Description of Artificial Sequence: Synthetic polynucleotide
tgtacatttggaggaaattgctcagaaaaagattaaggaaatttgcattagatgcatttgctgccttagattacttgatattgttgagaaattagatttattatactctgacgagacttgctatttaataaggggtttgtggaggggctattgcagaaattgtattaggaaaca

SEQ ID NO: 1179 - DNA, 174 bp, Artificial Sequence
  Description of Artificial Sequence: Synthetic polynucleotide
tgacaatggcgactagcctcccaagccagccacccagggcgagtcatcgacccaaaaggtcagaccgtctcacacaaacaatcccaagtaaaggctctgacgtctccccctttttttaggaactgaaaccacggccctgacgtccctcccccctaggaacaggaacagctctcc

SEQ ID NO: 1180 - DNA, 174 bp, Artificial Sequence
  Description of Artificial Sequence: Synthetic polynucleotide
ctaactttttaacgaggtgtaagcatcaggttaatctaagacagtcacctattttcctgaccctcctgaggcacatccgccgacgtctgggcctgggccgtgcttccgtaaaacgagagattacccttctcctggcccacctgcgcaaaaagacagcccccatccactgccgtg

SEQ ID NO: 1181 - DNA, 174 bp, Artificial Sequence
  Description of Artificial Sequence: Synthetic polynucleotide
agactgggaggagttgggggaggagattaggttaaaggtctttgtactaggaggctgtaggcataaattggtctgttcaccagcaccatgcaactttttcccctctgcctaatcatctcatgttcatgtcctactgttcaagcctccaagctgtgccttgggtggctttggggc

SEQ ID NO: 1182 - DNA, 174 bp, Artificial Sequence
  Description of Artificial Sequence: Synthetic polynucleotide
ccagccgcgggctccgcgtcctcgtcgatcaccagcggtcgcgtcggcaccggagaatccacgtcatcctgcacgtcgttttcctcctctccgtcgtcatcgtccagaaacggcacccgctgcttagcccaggacattctttttccgcgtcctcaatcagcggcgccgatcgcc

SEQ ID NO: 1183 - DNA, 174 bp, Artificial Sequence
  Description of Artificial Sequence: Synthetic polynucleotide
agctagcgaacttcaattacctaaactagaatcctgctgtgatgaatacttgcgatttacagacggtgatgtgatagaactgacatgtgacgacggaaacatgtgagtttttactgtatgggacaatacttttcgtcttagaaacaaactcatttcttaatttctcgttcgcag

SEQ ID NO: 1184 - DNA, 174 bp, Artificial Sequence
  Description of Artificial Sequence: Synthetic polynucleotide
agcaaaagcaggtactgatccaaaatggaagactttgtgcgacaatgcttcaatccaatgattgtcgagcttgcggaaaaggcaatgaaagaatatggggaagatccgaaaatcgaaacgaacaaatttgccgcaatatgcacgcacttagaagtctgtttcatgtattcagat

SEQ ID NO: 1185 - DNA, 174 bp, Artificial Sequence
  Description of Artificial Sequence: Synthetic polynucleotide
gatgactcagctgacgacagtagtgtattagatttaggagggtcaggaaacccatttgctcatttgcgcccacagggttgcatagggtcattgtattaaattgaataaaagcatacttaccaaagccatggcgaccagtgttcgtcttattttccttcttccgttagctgtgaa

SEQ ID NO: 1186 - DNA, 717 bp, Artificial Sequence
  Description of Artificial Sequence: Synthetic polynucleotide
gagaggagcccgttttcgggcacttgtctcctaaacaatattggcgcgcatttgcgcgcccccccccatttcagccccctgtcattgactggtcgaaggcgttcgcaataagactggtcgtcacttggctgttctatcgtttcaggctttagcgcgccctcgcgcggcgggccgtcaagcccgtgcgctgtatagcgccaggtaaccggacagcggcttgctggattttcccggtgccattgctctggatggtgtcaccaagctgacaaatgcggactgaacctcacaaagcgacacacctgtggtagcgctgcccaaaagggagcggaactcccccgccgcgaggcggtcctctctggccaaaagcccagcgttaatagcgccttttgggatgcaggagccccacctgccaggtgtgaagtggagtgagtggatctccaatttggtctgttctgaactacaccatctactgctgtgaagaatgccctggaggcaagctggttacagccctgaccaggggccctgcccgtgactctcgatcggcgcagggtcaaaaattgtctaagcagcagcaggaacgcgggagcgtttcttttccctttgtatcgacatgatggcggcgtctaaggtgtatagagtttgcgagcagactctgctagcaggcgccgttcgcatgatggacaaatttttgcaaaagagaactgtttttgtccccca

SEQ ID NO: 1187 - DNA, 174 bp, Artificial Sequence
  Description of Artificial Sequence: Synthetic polynucleotide
cacttatcataagaggtggaattctttaaggataatcaatatacaaaattccacgacaattggcgcccaacgtggggctcgaatataagtcgggtcttattaaaaaagacttatttaggtcttacaattatccctagggaccttcacgcactgcggaaggaataagcactcaaa

SEQ ID NO: 1188 - DNA, 174 bp, Artificial Sequence
  Description of Artificial Sequence: Synthetic polynucleotide
ataatatcctgatgaattctatagaacttaggattaagaaaaaattcatgatgaagattaaaaccttcatcatcctttaaaaagagagctattctttatctgaatgtccttattaatgtctaagagctattattttgtaccctcttagcctagacactgcccagcatataagcc

SEQ ID NO: 1189 - DNA, 174 bp, Artificial Sequence
  Description of Artificial Sequence: Synthetic polynucleotide
tgtagcatcacctgagctgcttcctgatagcgaactgacagagcttatatgcaatgatttggatgactttgtacaactaatgctacgcatggagattcgggatcggggttttgagcctaatgttaatcttttaaatgaactgcaggtgacacgggaacctgatctttttcaacc

SEQ ID NO: 1190 - DNA, 174 bp, Artificial Sequence
  Description of Artificial Sequence: Synthetic polynucleotide
tattgtatggatatctgagtttattgtgtacacatctgtgctagtactaacactgcttttatatttactattgtggctgctattaacaacccccttgcaatttttcctactaactctacttgtgtgttactgtcccgcattgtatatacactactatattgttaccacacagca

SEQ ID NO: 1191 - DNA, 174 bp, Artificial Sequence
  Description of Artificial Sequence: Synthetic polynucleotide
ccaaccgtgggtcgtgtggacgccgcatatttagagagtaaatcccgcacccccctggcaaactccggtcctctagtgagggatacccggtgagttggtggaggtaaaagacccaacacttgcctacccaggcgagccgcattttcagcctgcaccttcatatccacgccggca

SEQ ID NO: 1192 - DNA, 174 bp, Artificial Sequence
  Description of Artificial Sequence: Synthetic polynucleotide
ggtgatcataaacacgcccaggaagtgacgtatgacagccaatcagcattgagcatatagcctatataaaccgatgcacttccgcatctcgtcagactgcatccggtctccggcgagtgaacatctctggaaagagctccacgcttgtggtgagtgacactatggccttttctg

SEQ ID NO: 1193 - DNA, 174 bp, Artificial Sequence
  Description of Artificial Sequence: Synthetic polynucleotide
atggaatggccccgacccagtgttaatatggggcagaggttcagtctgtgtatactctcaagcccatgatgcagccagatggttaccagaacggctagtaaggcaaataaacaatgaaaatcagtccagggagtcatattctccctgagatcatctctcctcttacctacagaa

SEQ ID NO: 1194 - DNA, 174 bp, Artificial Sequence
  Description of Artificial Sequence: Synthetic polynucleotide
gtttttcaagaacgtggtatcttttacatgtttgagacctacataaaagtgactcagagttcggatacggcgttgcctgatttggagcgaccccgacccgcgaccccgcccttcagtgagacttcgtaactcccgctcgggcaccaccggctagtgtatgccgcgttagcagcc

SEQ ID NO: 1195 - DNA, 655 bp, Artificial Sequence
  Description of Artificial Sequence: Synthetic polynucleotide
ccccttcccccgaagtaacttagaagctgtaaatcaacgatcaatagcaggtgtggcacaccagtcataccttgatcaagcacttctgtttccccggactgagtatcaataggctgctcgcgcggctgaaggagaaaacgttcgttacccgaccaactacttcgagaagcttagtaccaccatgaacgaggcagggtgtttcgctcagcacaaccccagtgtagatcaggctgatgagtcactgcaacccccatgggcgaccatggcagtggctgcgttggcggcctgcccatggagaaatccatgggacgctctaattctgacatggtgtgaagagcctattgagctagctggtagtcctccggcccctgaatgcggctaatcctaactgcggagcacatgctcacaaaccagtgggtggtgtgtcgtaacgggcaactctgcagcggaaccgactactttgggtgtccgtgtttccttttattcctatattggctgcttatggtgacaatcaaaaagttgttaccatatagctattggattggccatccggtgtgcaacagggcaattgtttacctatttattggttttgtaccattatcactgaagtctgtgatcactctcaaattcattttgaccctcaacacaatcaaac

SEQ ID NO: 1196 - DNA, 174 bp, Artificial Sequence
  Description of Artificial Sequence: Synthetic polynucleotide
atgttttataagtacaaccattttttcccagagacctatgaagattgttggaaagggatttattatttgtttgttctgtttattttggcttgcattgcatatcatgattatataagtccttcaatagcagagaatatgttatcatttatcaggtgctctaaatatccctagaag

SEQ ID NO: 1197 - DNA, 174 bp, Artificial Sequence
  Description of Artificial Sequence: Synthetic polynucleotide
ataaataacataaccaatagaaacttaatacagagtcacgccccattacaacaaggataaaacacgggatcattttcttaacattgtagtagcgctgaaaagcgtcccctcccccggctcacagagctgctcttcggtgtagttgggtatactggtgcgcctcatttaatcgcg

SEQ ID NO: 1198 - DNA, 174 bp, Artificial Sequence
  Description of Artificial Sequence: Synthetic polynucleotide
ttgagctgtccgaggagcaccctcagggcccggcccacggagtgcggatcgtcgtcgaagggggcctagactcccacctgcttcgtatcttcagccagcgcccgatcctggtccagcgccaacagggcaacaccctcctgaccctttactgcatctgcaaccaccccggcctgc

SEQ ID NO: 1199 - DNA, 174 bp, Artificial Sequence
  Description of Artificial Sequence: Synthetic polynucleotide
agtccgcccccctccttattccactgatcgccgcggcgattggcgccgtgcccggaattgcatccgtggccttgcaggcgcagagacactgattaaaaacaagttgcatgtggaaaaatcaaaataaaaagtctggactctcacgctcgcttggtcctgtaactattttgtaga

SEQ ID NO: 1200 - DNA, 174 bp, Artificial Sequence
  Description of Artificial Sequence: Synthetic polynucleotide
ttgtttttctgagaacatcagctctggtattttcccatgccttgcaaaatggcgttactgcagttagctggctaagccttatgaaggggtctttcattcccccctctttctgtaaactgaataaaatcttttattcacgtgatttttaatcttttactgtcttaagtagccaac

SEQ ID NO: 1201 - DNA, 174 bp, Artificial Sequence
  Description of Artificial Sequence: Synthetic polynucleotide
tcggcagaggatcattgtgttctgatcccaccgccgcgtctagagaggcgcgctctgccatctgactctttctcttgcctctacgctactcgatctcgccgccgtttctggtttctttttgttttgtttctgataagcctctgtgtcggagtttctctcttcgaaatcttcgaa

SEQ ID NO: 1202 - DNA, 174 bp, Artificial Sequence
  Description of Artificial Sequence: Synthetic polynucleotide
ttccgattacgattttacgatttcattaaatgtaatttgtgtaattcatctttaaagagaaagagaaatcctctgacaataaaaaattgaacagtgaagcttgcttaaaactttgaaaattttttgtgattttaaataaaatttaaaatcaatttatcctaagcttttcaggct

SEQ ID NO: 1203 - DNA, 174 bp, Artificial Sequence
  Description of Artificial Sequence: Synthetic polynucleotide
acatgcctgcaatatgcatgtgtaaagccaagttctggagttaatataataaatcgtttttggcaaaatatcgcgctgtttggaaaagttgaagaaatctttacgtcctgttcatgtttccaaattatagactgatacgctttctgaattgcatctatatcgcatgatcgcaac

SEQ ID NO: 1204 - DNA, 174 bp, Artificial Sequence
  Description of Artificial Sequence: Synthetic polynucleotide
gtatcctgcccctccttattccactgatcgccgcggcgattggcgccgtgcccggaattgcatccgtggccttgcaggcgcagagacactgattaaaaacaagttgcatgtggaaaaatcaaaataaaaagtctggagtctcacgctcgcttggtcctgtaactattttgtaga

SEQ ID NO: 1205 - DNA, 174 bp, Artificial Sequence
  Description of Artificial Sequence: Synthetic polynucleotide
atgaagctagcttaatgtatttaaagagtagactagtattttttaagtttcctaacaaattacctttaaaagaaaatgatgaagtactttatgaaattactgatgcatcatggaaatgtttttttatcaaatttgcaagccatttagagctgacagccagaggagacgagcagc

SEQ ID NO: 1206 - DNA, 174 bp, Artificial Sequence
  Description of Artificial Sequence: Synthetic polynucleotide
cattgtgatcggggtggtcatcctagcgatgctgctctacttcatcttctgccgccgcatccccaacgcgaaaccggtctacaagcccatcgttatcgggcagccggagccgcttcaggtggagggaggtctaaggaatcttctcttctcttttacagtatggtgatttgaact

SEQ ID NO: 1207 - DNA, 174 bp, Artificial Sequence
  Description of Artificial Sequence: Synthetic polynucleotide
caaaattttactttgattgattttgcaaggagttataaaaatcttgaaggataaattgttataaagtagagtcgaagaacattaaatgttctttgttagaattattcatctaagttgtttttgagtatattcgcttcaatacaactcctctttatatttgatttaagttttaaa

SEQ ID NO: 1208 - DNA, 174 bp, Artificial Sequence
  Description of Artificial Sequence: Synthetic polynucleotide
gcgacagcgcaataaggtctctgttgaaattttctcccagcagcacctcacttccctcttcccaactctggtattctaaaccccgttcagcggcatactttctccatactttaaaggggatgtcaaattttagctcctctcctgtacccacaatcttcatgtctttcttcccag

SEQ ID NO: 1209 - DNA, 174 bp, Artificial Sequence
  Description of Artificial Sequence: Synthetic polynucleotide
ttttcgttgctaagtttgtgactctctccctttattgccttgtttgctggtgggttttgaaattgacatggtaattaataaacagcgttcgtgctttagagtatgagtttgattgtatttgtctctgtgcatttcacttgtttttttttctctgatcatttgcatgttgctagt

SEQ ID NO: 1210 - DNA, 174 bp, Artificial Sequence
  Description of Artificial Sequence: Synthetic polynucleotide
gtagggaagccaggaatgtccaggaggtaccccttccgctcggaagggatctgacctggagacacatcacatgtgctttacacctgtgcttgtgtttaaaaattgtcgcagcttccccaaaccaagtggtcttggttttctctttttattatattgtcaatatggcttgcaaac

SEQ ID NO: 1211 - DNA, 174 bp, Artificial Sequence
  Description of Artificial Sequence: Synthetic polynucleotide
aataaattacgaaaacgtgcatgcgttttttatttttacaatgcgccgtatatggtatgtctgtcatgtgctctaaagtcccatatataaaagaagccccaacgagtgtatgcgtattgcgtaccgcgaccctgggatgttttacaggcgcgtttgtttgtctcggttataagt

SEQ ID NO: 1212 - DNA, 174 bp, Artificial Sequence
  Description of Artificial Sequence: Synthetic polynucleotide
gtcctaaaagttcgcaaggagtaaaacttcgcgaaagcacacactctttgggaacaccaaaagctagcaaacttctgatcttttttttctcattttcaatgagattatttaaggaagtttcatcaattgtctgatgtttccttttttgaagcatttccattgttcgcaagcgaa

SEQ ID NO: 1213 - DNA, 174 bp, Artificial Sequence
  Description of Artificial Sequence: Synthetic polynucleotide
accaaacaagaggaaaaacttgtttggaatatataataatattaaatagtattttagggttaaagtaatactttaaagggacaagtcacagacatttgatcttagtataaatttttataatggccgggctactaagtacttttgacacatttagttccaggagaagtgagagca

SEQ ID NO: 1214 - DNA, 174 bp, Artificial Sequence
  Description of Artificial Sequence: Synthetic polynucleotide
cgcgtgcggttttctgggtgttttttgtggactttaaccgttacgtcattttttagtcctatatatactcgctctgcacttggcccttttttacactgtgactgattgagctggtgccgtgtcgagtggtgtttttttaataggttttcttttttactggtaaggctgactgtt

SEQ ID NO: 1215 - DNA, 129 bp, Artificial Sequence
  Description of Artificial Sequence: Synthetic polynucleotide
cgacagcgccctgcgaattggtgtgcccacaccgcgcggcttgcgaataatactttggagagtcttttgcctccagtgtcttccgtttgtactcgtcctcctctccctctccggccgggatgggacagg

SEQ ID NO: 1216 - DNA, 174 bp, Artificial Sequence
  Description of Artificial Sequence: Synthetic polynucleotide
gacgctctagaatgattattagctttaccagtaaatctcaaagacaaatgtttttaagtattatgaaattaccaaagggcgttgattggtctcttgggtgctttgactctatttaacacactaacctttctagtttttttactaacacatacgtttcaatagaattgttaatgc

SEQ ID NO: 1217 - DNA, 280 bp, Artificial Sequence
  Description of Artificial Sequence: Synthetic polynucleotide
acttggttatgaattcattgtattaacccctctgaaagacctgctctggcgcgagctaaagcgcaattgtcaccaggtattgcaccaatggtggcgacagggtacagaagagcaagtactcctgactgggtaatgggactgcattgcatatccctaggcacctattgagatttctctggggcccaccagcgtggagttcctgtatgggaatgcaggactggacttgtgctgcctgacagggtcgcggctggccgtctgtactttgtatagtcagttgaaa

SEQ ID NO: 1218 - DNA, 174 bp, Artificial Sequence
  Description of Artificial Sequence: Synthetic polynucleotide
agacaatcactattagctgctaaggtttgaatgctgcttgttttgcccgcacccgcagtaccggttattaataatactctaaaaggtaaaaatggcaacggttgagcaaattcttcatcacctatagaatgaatttcttcaaaattgctattaaattctaattcaggatcaaga

SEQ ID NO: 1219 - DNA, 174 bp, Artificial Sequence
  Description of Artificial Sequence: Synthetic polynucleotide
gctggtacaagagtgcacgaaagtggatgtggattatagatgactgaattgtgttgccgcgtcttaaatgggtttgttcttttataaagtttcaaatttgtttctattgtattccacagagatgcggcagattttttggaagaaattgcaaacgatctgtgaattctaaatatc

SEQ ID NO: 1220 - DNA, 174 bp, Artificial Sequence
  Description of Artificial Sequence: Synthetic polynucleotide
tcaggtgacatatctactacattatcagattataatattttagatgcatccttgatagtaaaatcaaatgtttctgaacagcccctttttgttttagattattcagattatgatttacatccaggtcttcttccaaaaagaagacgcatagattatttttaatttattttacag

SEQ ID NO: 1221 - DNA, 174 bp, Artificial Sequence
  Description of Artificial Sequence: Synthetic polynucleotide
ggtttgtgtgggtattctgggtatttcctgttttgtaggactgaaggagataatatactttatatttgttagtgttaattccatgtggcctttttgtaataagttattgactacggcggttaactgtttcttcaagggccgtacctttcttcgacgtgaattaaagatttaaaa

SEQ ID NO: 1222 - DNA, 174 bp, Artificial Sequence
  Description of Artificial Sequence: Synthetic polynucleotide
agttcctcctaatgactgaagcaccaacagagtttcccccagaagatgggaccccacggagggacttagggagtgactgggtaatagaaactctgagggaaataaaggaagaagccttaagacattttgatccccgcttgctaattgctcttggctactatatccataatagac

SEQ ID NO: 1223 - DNA, 174 bp, Artificial Sequence
  Description of Artificial Sequence: Synthetic polynucleotide
atgctggtgttgatatctatagtccaactgctagtgttggatcacctactataaatcctactgatcttgacattccattaattattatacatttagataattcaacaggggattatgatttacatccaagtttgcgtaaacgtcgcaaattagttcatatttgatattttacag

SEQ ID NO: 1224 - DNA, 174 bp, Artificial Sequence
  Description of Artificial Sequence: Synthetic polynucleotide
atactgggcctgatattgtactacctacttcagcacagtggccatatgtgcccctgtcacctgctgacaccacccattatgtgtacatagatggcggggatttctatctttggcctgttacctttcacttctcccgacatcgtcgccgtaaacgtgtctcatatttttttgcag

SEQ ID NO: 1225 - DNA, 174 bp, Artificial Sequence
  Description of Artificial Sequence: Synthetic polynucleotide
ctcggttgtaacgcgcttaggaagtcccctcgaggtatggcagatatgctcttgcatagggggaaaaaatgtagtcttaatattgtctgtgtgctgcaggagctaagctgactctgctggtggcctcgcgtaccactgtggccaggcggtagctgggacgtgcagccgaccacc

SEQ ID NO: 1226 - DNA, 174 bp, Artificial Sequence
  Description of Artificial Sequence: Synthetic polynucleotide
ggaaatatgtatataacattaaagatataactttttattaaaaaaaggggaacacaagtcccgacacgtaccgtggcaccttggaggaagggccctcgtcaggattatcagggtccatctttctcttggcagaggactccatcgtgtcaaggacggtgactgcagaaaggatcc

SEQ ID NO: 1227 - DNA, 174 bp, Artificial Sequence
  Description of Artificial Sequence: Synthetic polynucleotide
gggtggctttttgccagctcttatacccatcatcgccgcagcgatcggggcgataccaggcatagcttccgtggcggttcaggcctcgcagcgccactaacattggaaaaacttataaataaaaaatagaatggactctgacgctcctggtcctgtgactatgtttttgtagag

SEQ ID NO: 1228 - DNA, 174 bp, Artificial Sequence
  Description of Artificial Sequence: Synthetic polynucleotide
gcgtgctcgtgaaaacgctgtcctccgcctcctcatccgccggcgtgtcctcgttgctcgaggggatataaatcaccgtcgagggttcgccagagcgacgtgacgagctgcgacgccgcgacgacatcctctcgtctgctgaggtgcgttcggctcagttgcttacctgcatac

SEQ ID NO: 1229 - DNA, 174 bp, Artificial Sequence
  Description of Artificial Sequence: Synthetic polynucleotide
ggttcgacggcccatgacgatttagaatacaccgagccattcctttatttccccccatccccggtcgcttatgcgtgtcaaacactaccaataaagataatctgccaatcgcaccttatatataatatgtggtcgcgtgtggtctttttaaggagctctgaaacacagacaggt

SEQ ID NO: 1230 - DNA, 174 bp, Artificial Sequence
  Description of Artificial Sequence: Synthetic polynucleotide
atgaatggctaattgacaccttagcagaagttcaagaagaagctttaaagcattttgatagacgcttattgcatgcagtaggaagctggatctacaaaacctatggggatacattagaaggggtgcgacagcttatctcaattcttcaaaaagctctgtctatgcactatagat

SEQ ID NO: 1231 - DNA, 174 bp, Artificial Sequence
  Description of Artificial Sequence: Synthetic polynucleotide
gtggatgtgacggaggacctgcgacccgatcatttggtgttgtcctgcaccgggacggagttcggctccagtggggaagaatctgactagagtgagtagtgttttggggagggagaggacctgcataaggggcagaatgattaaaatctgtgcttttctgtgtgttgcagcagc

SEQ ID NO: 1232 - DNA, 510 bp, Artificial Sequence
  Description of Artificial Sequence: Synthetic polynucleotide
acttagaagcacaatgtccaagttcaataggagggggtacaaaccagtaccaccacgaacaagcacttctgttcccccggtgaggctgtataggctgtttccacggctaaaagcggctgatccgttatccgctcatgtacttcgagaagcctagtatcaccttggaatcttcgatgcgttgcgctcaacactcaaccccagagtgtagcttaggtcgatgagtctggacgttcctcaccggcgacggtggtccaggctgcgttggcggcctacctgtggcccaaagccacaggacgctagttgtgaacaaggtgtgaagagcctattgagctacctgagagtcctccggcccctgaatgcggctaatcctaaccacggagcaggcagtggcaatccagcgaccagcctgtcgtaacgcgcaagttcgtggcggaaccgactactttgggtgtccgtgtttccttttatttttacaatggctgcttatggtgacaatcattgattgttatc

SEQ ID NO: 1233 - DNA, 174 bp, Artificial Sequence
  Description of Artificial Sequence: Synthetic polynucleotide
gagggttttgctggctccattgtatattaagatgcaaattgagacaccgcctactgtgctgatagccaatgaaaaaatatctcccgtcagcacatataatactatataaggacattaccaccacctctttctttgcagagattctctgcttgcacatctgtaacactgaccata

SEQ ID NO: 1234 - DNA, 174 bp, Artificial Sequence
  Description of Artificial Sequence: Synthetic polynucleotide
ttaaaatcagtcagcaaatctttgtccagcttattcagcatcacctcctttccttcctcccaactctggtatctcagccgccttttagctgcaaactttctccaaagtttaaatgggatgtcaaattcctcatgttcttgtccctccgcacccactatcttcatattgttgcag

SEQ ID NO: 1235 - DNA, 697 bp, Artificial Sequence
  Description of Artificial Sequence: Synthetic polynucleotide
attgatgtgttggtcgtttgccaatcggagggcgacaggcacaggtcgctccgagttctagtagtgtgggaacttgttactactgatgaaacgaggtagtgacactcagtacctgcgaacgaggtcggggccctcccttcttccttcacccaactttcacttttcgttccactttagcaggggtcttctttctatccccctggcggcattggaactagccgtcgcgtcttaacgcgcagccctgaaggccccacaccttgtggatcttgccgtgggtatgtttctggcatgtgtttctcaagcctgcaaccgaagccgaacagccacatgaacagtttgagcgtggtagcgctgtgtgagttggcggtggatccccctcgtggtaacacgagcccccgtggccaaaagcccagtgtttacagcacctctcacatccaggacgaccccatcctggcgctcactcttagtagtatggcttagtacgcattaggtggtaagccgagctctccctcggccttgttctgaatgcacacatgtctaggggctaaggatgtcctacaggtacccgcacgtaaccttcagagagtgcggatctgagtaggagaccgtggtgcactgctttacagatgcagcccggtttaaaaagcgtctatgcccctacagggtagcggtgggccgcgccctttccttttaaaac

SEQ ID NO: 1236 - DNA, 174 bp, Artificial Sequence
  Description of Artificial Sequence: Synthetic polynucleotide
gcgtgttaaatgtggttcatccttcttctgagtggactattttgattcctaatgttccagatgaaattattcagcctgctatggcagtagatgtttatgatgacttttatttacatcctcatcttcttaggcgacgcaaacgaaaacggttggattttttttaatgttttacag

SEQ ID NO: 1237 - DNA, 174 bp, Artificial Sequence
  Description of Artificial Sequence: Synthetic polynucleotide
aaataggttaagtgtctgtatccaacattaataaaatgtagtcgggcatctaatgaaggcagcattatatcgtacagttttggtaacatagggagaaaagctatttcaatttcaactcgggaagataattgttcataaagaatttctatatctgttttggcattgtcgttagac

SEQ ID NO: 1238 - DNA, 174 bp, Artificial Sequence
  Description of Artificial Sequence: Synthetic polynucleotide
cccttagaggaggggtatgtggttctggtaggagacagagggctaaaacggtttccgcccccgtctgagtttttgctttcggtttggaaccgaagccgcgccgcgcgtcttgtctgctgcagcatcgttctgtgttgtctctgtttgactgtttttctgtatttgtctgaaaac

SEQ ID NO: 1239 - DNA, 174 bp, Artificial Sequence
  Description of Artificial Sequence: Synthetic polynucleotide
aaagcttaccttaaatttgatatcagttgtttgtcaagtttttccagcagcaccacctgcccttcctcccaactttcgtacgggatgtgccaacgggcggcaaactttctccacgtcctaaagggtatatcggtgttcacctttttaccctgacccacaatcttcatcttgcag

SEQ ID NO: 1240 - DNA, 174 bp, Artificial Sequence
  Description of Artificial Sequence: Synthetic polynucleotide
gttattttagataacagtatatgagtggcatgggtctagacaacttgatcattatattaagaaaaacttaggatccaagaccataaatctaggatcctttacaatctcagaccctggtgcaaggttatatatagagcccaattctcctaattaaacagtgtctcaggttgacaa

SEQ ID NO: 1241 - DNA, 174 bp, Artificial Sequence
  Description of Artificial Sequence: Synthetic polynucleotide
tcagtgaaaacgtgcctgctctcacagatcacgggacgctaccgctgcgcagcagtatccgcggagtccagcgagtgaccgtcactgacgcccgtcgccgcacctgtccctacgtctacaaggccctgggcatagtcgcgccgcgcgtgctttccagtcgcaccttctaaaaaa

SEQ ID NO: 1242 - DNA, 174 bp, Artificial Sequence
  Description of Artificial Sequence: Synthetic polynucleotide
ttccctgctgacgcagtttcggggtgtgtgttgggcttggcgggattttttacactttactcccattacgtcagtttagggcttgtgtatatattgtggagaggttggagagcgtctttagagcttctttagagcttgtgctttgtgcgcccgctatactttgtctggtaagcc

SEQ ID NO: 1243 - DNA, 174 bp, Artificial Sequence
  Description of Artificial Sequence: Synthetic polynucleotide
cctctcctgaagttcttaacttatttacattgattcaacaggttctccattgccgccaacacccctgtttctttggacatattcgtgcacactccacccttcctggtgccctcgtacaaggcaatcacactgcggacgttcttactaaacaagtgtttttccaatcagctattg

SEQ ID NO: 1244 - DNA, 174 bp, Artificial Sequence
  Description of Artificial Sequence: Synthetic polynucleotide
tggggctttgccctcattgtattaatgtgggagcttggtataatggatggaaatttagagagtttactccagacttagtgcgctgcagttgtcatgtaggagcctctaacccattttctgtgttaacttgtaaaaaatgtgcttacctgtctggattacaaagttttgtagatt

SEQ ID NO: 1245 - DNA, 174 bp, Artificial Sequence
  Description of Artificial Sequence: Synthetic polynucleotide
cattggactgtagcagatgaagagcttttaaaaaatataaaaaatgaaactgggtttcaagcacaagtagtaaaagactactttactttaaaaggtgcagctgcccctgtggcccattttcaaggaagtttgccggaagttcccgcttacaacgcctcagaaaaatacccaagc

SEQ ID NO: 1246 - DNA, 174 bp, Artificial Sequence
  Description of Artificial Sequence: Synthetic polynucleotide
tagtttcatatcctgaaatggtaaatgtaaacaaaattgaaatccctgcaactacattagtgccctctgaaccagacattagactagattggttttctccagattatgatttgcacccttctttacttcgtagacgacgcaaacgcaaacgcaatatgttttgatgttttgcag

SEQ ID NO: 1247 - DNA, 174 bp, Artificial Sequence
  Description of Artificial Sequence: Synthetic polynucleotide
attcttatactggctgcttatggtgacaattgaaagattgttaccatatagctattggattggccatccggtgtgcaacagagctattatttacctatttgttgggtatataccactcacatccagaaaaaccctcgacacactagtatacattctttacttgaattctagaaa

SEQ ID NO: 1248 - DNA, 174 bp, Artificial Sequence
  Description of Artificial Sequence: Synthetic polynucleotide
catccgtaatacaacccggaataacctccaaaccgagaagaactagtctatgaccagacgaaaaggaactagtccctgttcttttcttagggcctttttcacctgggtaaagtgtagttattgcgtataactctggtatcaataccacccggaagaaattatttatctgccatc

SEQ ID NO: 1249 - DNA, 408 bp, Artificial Sequence
  Description of Artificial Sequence: Synthetic polynucleotide
ccttcatcaagacaccaggtctttcctccttaaggctagccccggcgtgtgaattcacgttgggcaactagtggtgtcactgtgcgctcccaatctcggccgcggagtgctgttccccaagccaaacccctggcccttcactatgtgcctggcaagcatatctgagaaggtgttccgctgtggctgccaacctggtgacaggtgccccagtgtgcgtaaccttcttccgtctccggacggtagtgattggttaagatttggtgtaaggttcatgtgccaacgccctgtgcgggatgaaacctctactgccctaggaatgccaggcaggtaccccacctccgggtgggatctgagcctgggctaattgtctacgggtagtttcatttccaatccttttatgtcggagtc

SEQ ID NO: 1250 - DNA, 174 bp, Artificial Sequence
  Description of Artificial Sequence: Synthetic polynucleotide
aaaaactggctccttcctctgcacctggcctgggccacacccaagtgctgtggactggcccgaggggccctgcacgtggccctgagcacctctcagcgtagcctgcctagtccctagacccctagccagctccaaggggaggcacctccaagcaggccaggctacctcgggggt

SEQ ID NO: 1251 - DNA, 174 bp, Artificial Sequence
  Description of Artificial Sequence: Synthetic polynucleotide
aaaaatcacttacttgaaatctgaaagtatgtctctggtgtagttgttcagcagcacctcgttaccctcctcccagctctggtattccagtccccggcgggcggcgaacttcctccacaccttgaaagggatgtcaaattcctggtccacaattttcattgtcttccctctcag

SEQ ID NO: 1252 - DNA, 174 bp, Artificial Sequence
  Description of Artificial Sequence: Synthetic polynucleotide
tcccagcaaagagaacattgtggcattttccattgcttattgcttggtaacatgcatcatcactgctatcatttgtgtgtgcatacacttgcttatagttattcgccctagacaaagcaataaggaaaaagagaaaatgccttaacctttttactcataccttttctttacagc

SEQ ID NO: 1253 - DNA, 174 bp, Artificial Sequence
  Description of Artificial Sequence: Synthetic polynucleotide
gatcccatggatgagcccaccctgctttatcttcttttcgaagtcttcgacgtggtcagagtgcaccagccacaccgcggcgtcatcgaggccgtctacctgcgcacaccgttctcggccggcaacgccaccacataagaagcctcttgcttcttgcaagcagcagctgcagcc

SEQ ID NO: 1254 - DNA, 174 bp, Artificial Sequence
  Description of Artificial Sequence: Synthetic polynucleotide
ctacaaatattaatgtaggccctgacctttcacctcctgagtctccgccctttattagtacacgtcctgtatcaccttcttttgactctgttatggtattaggatgggattttatattgcatcccagttatatgtggcgtaagcgccgtaaacctgtaccatatttttttgcag

SEQ ID NO: 1255 - DNA, 174 bp, Artificial Sequence
  Description of Artificial Sequence: Synthetic polynucleotide
ggtggctttttgccagctcttatacccatcatcgccgcagcgatcggggcgataccaggcatagcttcagtggcggttcaggcctcgcagcgccactaacattggaaaaaacttataaataaaaaatagaatggactctgacgctcctggtcctgtgactatgtttttgtagag

SEQ ID NO: 1256 - DNA, 174 bp, Artificial Sequence
  Description of Artificial Sequence: Synthetic polynucleotide
ctgcaagtcgcactcgccgtcgccgccgccgcaacactgccagcaaattgactcccgccgccctggtgcggagagtgtaccgcgatggtcgcgctgaacctctgacgctgccgcgcgcgcgctaccatccaagcatcaccacttaatgactgttgacgctgcctccttgcagat

SEQ ID NO: 1257 - DNA, 174 bp, Artificial Sequence
  Description of Artificial Sequence: Synthetic polynucleotide
gaggagttcaggtagatattgaaagatgagccttctaaccgaggtcgaaacgtatgttctctctatcgttccatcaggccccctcaaagccgagatcgcgcagagacttgaagatgtctttgctgggaaaaacacagatcttgaggctctcatggaatggctaaagacaagacc

SEQ ID NO: 1258 - DNA, 174 bp, Artificial Sequence
  Description of Artificial Sequence: Synthetic polynucleotide
agaagccgccccattcctagaggtgccgatgaattctgggaaggaacatacattctcgtagttgcattcgtgctcgcatttctcgtttactccgattttcttagtaatttaagtccgtttggagaaattttatcttcgccttgtatttcaacgtgaatcttcgtcgtgaagagg

SEQ ID NO: 1259 - DNA, 174 bp, Artificial Sequence
  Description of Artificial Sequence: Synthetic polynucleotide
gtgctggtgaagctgggcgattgtctactgacttttttgcgtgtgggatttgccagactttttgcggactgcggttatgagaagattggaaaaatatccatgcgcttcggacggatgtcgacgttgggcatgtcggagacttatcaatcgtgcatgagcctcagtaagtagttc

SEQ ID NO: 1260 - DNA, 174 bp, Artificial Sequence
  Description of Artificial Sequence: Synthetic polynucleotide
atgcggtttttacgaactcaactttcaataagattcctttgacgacgataagtcggctttttgttcagttgattataggaggacacgctaaaggaacgatttatgacagcaatgtaattcgcgtcagtcgtcggaaacgagaagacagtttactaaaaaagatgagattggagt

SEQ ID NO: 1261 - DNA, 174 bp, Artificial Sequence
  Description of Artificial Sequence: Synthetic polynucleotide
gcttgaaacgccccaggaactaggcgcagctgtgcttagtcatgtgtaaataaagttgtacaataaaagtatgtgtgacgcatgcaaggtgtggtttatgactcatgggcggggcttagtcctatataagtggtaacacctgggcacttaggcacaaactttaggaagttccta

SEQ ID NO: 1262 - DNA, 174 bp, Artificial Sequence
  Description of Artificial Sequence: Synthetic polynucleotide
caattctgggatggaaccgactactttgggtgtccgtgtttcctgtttcacttaccttggctgcttatggtgacaattgtatagttgtcatcatatagctattggattggccatccggatattattcttgtgtttatttgtgtaatttgatataatttagaaccctgtataaga

SEQ ID NO: 1263 - DNA, 245 bp, Artificial Sequence
  Description of Artificial Sequence: Synthetic polynucleotide
tccagtataaatagtagctaggcgggataatgagtcgctgtttgcacattatcaaagctacgcattagataactgcagaaagacgctgcgtatagttatgtattcttagaatacgtctgtatatacgcacgaacatataagtctgtaagaatgtaatgcttcgtacagatcactgtttattgaagttcaacggtatgaaatttgagtatacctagaattagcaggaataattggcatctcaattt

SEQ ID NO: 1264 - DNA, 174 bp, Artificial Sequence
  Description of Artificial Sequence: Synthetic polynucleotide
ggctcgctccctgtagccggagggttattttccaagggttgagtcgcaggacccccggttcgagtctcgggccggccggactgcggcgaacgggggtttgcctccccgtcatgcaagaccccgcttgcaaattcctccggaaacagggacgagccccttttttgcttttcccag

SEQ ID NO: 1265 - DNA, 174 bp, Artificial Sequence
  Description of Artificial Sequence: Synthetic polynucleotide
tgaatcatgtaaatatggacaatcaaggccatacagcggccgaaagacattggggtccaatctcagccgatccaaaacctatggtcatgtggaaagaccttctcacagggtcctggaaaggacccgatgtcctaataacagccggacgaggctatgcttgtgtttttccacagg

SEQ ID NO: 1266 - DNA, 174 bp, Artificial Sequence
  Description of Artificial Sequence: Synthetic polynucleotide
caacccaatcgaaggtctcccgccccggaatcccccattgccattttacccaagtagccttattcatagatgtaaacgtttgggtgtgtgttttgttgtgcagggttcgtccgattcataacgcgacagcgtcgagtcggttttaagggaaaaggttactacggccccaaggac

SEQ ID NO: 1267 - DNA, 174 bp, Artificial Sequence
  Description of Artificial Sequence: Synthetic polynucleotide
tcggtctcctcctggcctgcgtcttgctcgtgctcctgttcatcctgtgggggttctagacgagccggctcttcgaagcccaggtcctgctcgattttgggttgctcgtgggtggttaagtcctcctcctgctcctgcttacgcggctgctcctccatcttcccctaggaaaca

SEQ ID NO: 1268 - DNA, 174 bp, Artificial Sequence
  Description of Artificial Sequence: Synthetic polynucleotide
agcctgacaacgaaaggatctcttacaaagttatagctccgtgcggttgcaggaactgtgaggtcaagcttcgcatttttgtccacgccacagaatttggtattagagctttccaacagctactgaccggagatctgcagctcctgtgccctgactgtcgcggaaactgcaaac

SEQ ID NO: 1269 - DNA, 174 bp, Artificial Sequence
  Description of Artificial Sequence: Synthetic polynucleotide
gggctgatacagggaagaatttgaaaagttattggacgatagtccgggactttttgaagctcttaacttgggtcatcaggctcattttaaggagaaggttttatcagttttagatttttctactcctggtagaactgctgctgctgtagcttttcttacttttatattggataa

SEQ ID NO: 1270 - DNA, 174 bp, Artificial Sequence
  Description of Artificial Sequence: Synthetic polynucleotide
tttgaagaaaatgcagcttgtggggtggatttaccccttagaaggccttctttaggtgcttgtggtggaattttacaaagtataaccgggatgttttcccatgggtaagaaaacagcttttaaagcagtaccggtttatattcacgccagttgactttgtttgctgcagacacc

SEQ ID NO: 1271 - DNA, 174 bp, Artificial Sequence
  Description of Artificial Sequence: Synthetic polynucleotide
ttggcaaatttgcttctcactttacattacgtagtcacgatatttcccatagtaataattttggtgttgtaactagttttactacttatggtaatactgtttctgaggctgtgtctagattagttgaatcagcttctgaatttattgtttggcgtgcagaggcacttaataagt

SEQ ID NO: 1272 - DNA, 174 bp, Artificial Sequence
  Description of Artificial Sequence: Synthetic polynucleotide
agaagactatagagaggaatttgaaaacatattggccgactgtccagggcttttggcttcactagacctttgttaccacttggtgtttcaggaaaaagtggtcagatccttagatttttcatctgtgggacgaacggttgcttctattgcttttttggcaaccatattggataa

SEQ ID NO: 1273 - DNA, 174 bp, Artificial Sequence
  Description of Artificial Sequence: Synthetic polynucleotide
atggattccatgtgtcttatcctgagagtagagcgtatccagaagttattcctacagaaccagataataccccaacagtaataattcacacagaagattttagtggtgattattatctacatcctagcttaaaatggaagaaacgaaaacgggcctatttataattttttgcag

SEQ ID NO: 1274 - DNA, 174 bp, Artificial Sequence
  Description of Artificial Sequence: Synthetic polynucleotide
agagtttacccctgctcttgttcccggggggcttctggctaagcagtttggtgataatatgagagagtttttacaactagaacttaaagaagaacttagagccaagggcatgtcaattgatgttgccattctcaattcgctacaggtgacacaggagcaagatattttgtcatt

SEQ ID NO: 1275 - DNA, 174 bp, Artificial Sequence
  Description of Artificial Sequence: Synthetic polynucleotide
ttttcctaggatttggctccatggcttagggcaacatatctatgaaacttatggggatacttgggcaggagtggaagccataataagaattctgcaacaactgctgtttatccattttcagaattgggtgtcgacatagcagaataggcgttactcgacagaggagagcaagaa

SEQ ID NO: 1276 - DNA, 174 bp, Artificial Sequence
  Description of Artificial Sequence: Synthetic polynucleotide
gtgcagttttggatagtgaaggatgccctgacggtacccataggtaacaagtgacactatggatctaagcaggggctcactctacgctgctttacagctggctgtgagttaaaaaacgtctagctatccacaacctaggggactaggttttccttttatttagattacaattat

SEQ ID NO: 1277 - DNA, 174 bp, Artificial Sequence
  Description of Artificial Sequence: Synthetic polynucleotide
tgcgtcgacctccttatcttctagggtagaggtggtggcaggactgggcggtggaatgcttaagctctgctccttttcctcgtcgctgaggacgagatgtgatggcactcgtggcgatgttgacagcaatggctgagtttccatgtctgttgtttctctgcctaggagaacaca

SEQ ID NO: 1278 - DNA, 174 bp, Artificial Sequence
  Description of Artificial Sequence: Synthetic polynucleotide
gccaggaacagccccctctgggctgtcaggagtgggtggctaggtgggaggtcgcagtcgaccccgatggtgttcagtagatgcaccacatcccccacttcgggatagtgtttcaggtaaagctcatggaggaaagattttaatggtcgggcatttcctctgttactactagcc

SEQ ID NO: 1279 - DNA, 174 bp, Artificial Sequence
  Description of Artificial Sequence: Synthetic polynucleotide
ccagcagcgcgcacgacgcgatcacggtaacccccatgactagacccacgcagatagccagccccgctagcgtatccagcgccatcccgttcgctcccgtcgtcgtctcctgaacaaagcaacaactccgcagtccccgttttcaaccgtttttgtttccttctccgcgagcaa

SEQ ID NO: 1280 - DNA, 174 bp, Artificial Sequence
  Description of Artificial Sequence: Synthetic polynucleotide
taaattttttaactttagacacagaaggcaattcagcagcccagcgtttttggggagaacgatcctcatgcaaaaaaccacttgtgcgatggaaggatccacttaccaatctgtggtatgggccagaccctgtattaatatggggacgagggcatgtttgtgtttttccacagg

SEQ ID NO: 1281 - DNA, 174 bp, Artificial Sequence
  Description of Artificial Sequence: Synthetic polynucleotide
cctaccttgacattggctggaaacgaatagatgccatgaaccacccaactttccccgcgcccgctatgcttccactgcaacaagttgttgccggcggctttgtcccagccaatcagcctcgccccacttctcccacccccactgaaatcagctactttaatctaacaggaggag

SEQ ID NO: 1282 - DNA, 174 bp, Artificial Sequence
  Description of Artificial Sequence: Synthetic polynucleotide
atgagaggtatagatttttggttagcagaattaaaatatttgaatttaagaataaatttccttttaatgaagatggtacccctatgtttgaacttactgaccaaagctggaaatctttttttcaaaggctttggaagcagttagatctaagtgaccaagaagacgagggggagg

SEQ ID NO: 1283 - DNA, 174 bp, Artificial Sequence
  Description of Artificial Sequence: Synthetic polynucleotide
agcaaaagcaggggataattctattaaccatgaagactatcattgctttgagctacattctatgtctggttttcgctcaaaaacttcccggaaatgacaacagcacggcaacgctgtgccttgggcaccatgcagtaccaaacggaacgatagtgaaaacaatcacgaatgacc

SEQ ID NO: 1284 - DNA, 174 bp, Artificial Sequence
  Description of Artificial Sequence: Synthetic polynucleotide
ataagttgtgtgcagacatcctaatacatagcacttatttctcttgctttacggcaggtgaagtaagaagagccatcagaggggaaaagttattgtcctgctgcaactatccccaagctcataaagcacaggtaccatcacttcaatacctagccctagtagtagtacaacaaa

SEQ ID NO: 1285 - DNA, 174 bp, Artificial Sequence
  Description of Artificial Sequence: Synthetic polynucleotide
ccttttcacgcacttcagagcaggatgtggccactcaagaattggccagacaaggggaggaaatcctctctcagctataccgacccctagaaacatgcaataactcatgctattgtaagcgatgctgctaccattgtcagatgtgttttctaaacaaggggctcgggatatgtt

SEQ ID NO: 1286 - DNA, 144 bp, Artificial Sequence
  Description of Artificial Sequence: Synthetic polynucleotide
gagcgtttgggagagctgattctgcagcccagagagtagtctcagggcatcctctggagcctgacctgtgatcgtcgcatcatagaccgccagtagacctgggagcagattcaccgccgcggccgtctcctttaagtgtgaatc

SEQ ID NO: 1287 - DNA, 232 bp, Artificial Sequence
  Description of Artificial Sequence: Synthetic polynucleotide
cgcggcagactccttttcccgccaagaacttatagaccaggagaaagaactccttgagaagttggcgtggcgaacagaggcagtcttagcgacggacgtcacttccttcttgttacttaaattgctggggggctcccaacacctggacttttggcaccacgaggtcaacaccctgattacaaaagccttagttgacccaaagactggctcattgcccgcctctattatcagc

SEQ ID NO: 1288 - DNA, 219 bp, Artificial Sequence
  Description of Artificial Sequence: Synthetic polynucleotide
atataatacttgagatgcactgtttcatggttacccatcatttgaggaaatttccaataaacttgaatgtaaggcttgaaacagtggtctaggtgccctatttagggtgaggagcctagctggcagccccagtgaatcctctattggatagaaaccgctatatcgggtagctatagcagtcggatagtaatatatccggcgtttcgaaataccatacct

SEQ ID NO: 1289 - DNA, 177 bp, Artificial Sequence
  Description of Artificial Sequence: Synthetic polynucleotide
gatctgattagaagtaagaaaattcctagttataatatttttaatactgctacatttttaagacccttagttatttagctttaccgcccaggatggggtgcagcgttcctgcaatatccagggcacctaggtgcagccttgtagttttagtggactttaggctaaagaatttcacta

SEQ ID NO: 1290 - DNA, 148 bp, Artificial Sequence; identical to SEQ ID NO: 1169
  Description of Artificial Sequence: Synthetic polynucleotide

SEQ ID NO: 1291 - DNA, 116 bp, Artificial Sequence
  Description of Artificial Sequence: Synthetic polynucleotide
ctctctctcactggtcctcctactttgtcatctgattcctgaaatcaaaccgattcacacatcctacaacacacacgactcatcgaagcagcaacacataagcatcaacactggaa

SEQ ID NO: 1292 - DNA, 113 bp, Artificial Sequence
  Description of Artificial Sequence: Synthetic polynucleotide
ctctctaagcgacagcgacgcaacaggaaaacggaagaaaggcggagagaaaagtgcgaagaagagattggtagctagccacgcggctagctctgttttaaacaagaaaagaa

SEQ ID NO: 1293 - DNA, 742 bp, Artificial Sequence
  Description of Artificial Sequence: Synthetic polynucleotide
ttaaaacagctctggggttgtacccaccccagaggcccacgtggcggctagtactccggtattgcggtacccttgtacgcctgttttatactcccttcccgtaacttagacgcacaaaaccaagttcaatagaagggggtacaaaccagtaccaccacgaacaagcacttctgtttccccggtgatgtcgtatagactgcttgcgtggttgaaagcgacggatccgttatccgcttatgtacttcgagaagcccagtaccacctcggaatcttcgatgcgttgcgctcagcactcaaccccagagtgtagcttaggctgatgagtctggacatccctcaccggtgacggtggtccaggctgcgttggcggcctacctatggctaacgccatgggacgctagttgtgaacaaggtgtgaagagcctattgagctacataagaatcctccggcccctgaatgcggctaatcccaacctcggagcaggtggtcacaaaccagtgattggcctgtcgtaacgcgcaagtccgtggcggaaccgactactttgggtgtccgtgtttccttttattttattgtggctgcttatggtgacaatcacagattgttatcataaagcgaattggattggccatccggtgaaagtgagattcattatctatctgtttgctggattcgctccattgagtgtgtttactctaagtacaatttcaacagttatttcaatcagacaattgtatcata

SEQ ID NO: 1294 - DNA, 574 bp, Artificial Sequence
  Description of Artificial Sequence: Synthetic polynucleotide
cccccccccccccccccccccccccccccctctccctcccccccccctaacgttactggccgaagccgcttggaataaggccggtgtgcgtttgtctatatgttattttccaccatattgccgtcttttggcaatgtgagggcccggaaacctggccctgtcttcttgacgagcattcctaggggtctttcccctctcgccaaaggaatgcaaggtctgttgaatgtcgtgaaggaagcagttcctctggaagcttcttgaagacaaacaacgtctgtagcgaccctttgcaggcagcggaaccccccacctggcgacaggtgcctctgcggccaaaagccacgtgtataagatacacctgcaaaggcggcacaaccccagtgccacgttgtgagttggatagttgtggaaagagtcaaatggctctcctcaagcgtattcaacaaggggctgaaggatgcccagaaggtaccccattgtatgggatctgatctggggcctcggtgcacatgctttacgtgtgtttagtcgaggttaaaaaacgtctaggccccccgaaccacggggacgtggt

SEQ ID NO: 1295 - DNA, 721 bp, Artificial Sequence
  Description of Artificial Sequence: Synthetic polynucleotide
tttgaaatggggggctgggccctgatgcccagtccttcctttccccttccggggggttaaccggctgtgtttgctagaggcacagaggggcaacatccaacctgcttttgcggggaacggtgcggctccgattcctgcgtcgccaaaggtgttagcgcacccaaacggcgcacctaccaatgttattggtgtggtctgcgagttctagcctactcgtttctcccccgaccattcactcacccacgaaaagtgtgttgtaaccataagatttaacccccgcacgggatgtgcgataaccgtaagactggctcaagcgcggaaagcgctgtaaccacatgctgttagtccctttatggctgcaagatggctacccacctcggatcactgaactggagctcgaccctccttagtaagggaaccgagaggccttcgtgcaacaagctccgacacagagtccacgtgactgctaccaccatgagtacatggttctcccctctcgacccaggacttctttttgaatatccacggctcgatccagagggtggggcatgacccctagcatagcgagctacagcgggaactgtagctaggccttagcgtgccttggatactgcctgatagggcgacggcctagtcgtgtcggttctataggtagcacatacaaatatgcagaactctcatttttctttcgatacagcctctggcacctttgaagatgtaa

SEQ ID NO: 1296 - DNA, 421 bp, Artificial Sequence
  Description of Artificial Sequence: Synthetic polynucleotide
atgggcgcgagaaactccgtcttgagagggaaaaaagcagatgaattagaaagaatcaggttacggcccggcggaaagaaaaagtacaggctaaaacatattgtgtgggcagcgaataaattggacagattcggattagcagagagcctgttggagtcaaaagagggttgtcaaaaaattcttacagttttagatccaatggtaccgacaggttcagaaaatttaaaaagtctttttaatactgtctgcgtcatttggtgcatacacgcagaagagaaagtgaaagatactgaaggagcaaaacaaatagtgcggagacatctagtggcagaaacaggaactgcagagaaaatgccaagcacaagtagaccaacagcaccatctagcgagaagggaggaaattacccagtgcaacatgtag

SEQ ID NO: 1297 - DNA, 127 bp, Artificial Sequence
  Description of Artificial Sequence: Synthetic polynucleotide
cagttcccgcctccgtctgaatttttgctttcggtttgggaccgaagccgcgccgcgcgtcttgtctgctgcagcatcgttctgtgttgtctctgtctgactgtgtttctgtatttgtctgagaata

SEQ ID NO: 1298 - DNA, 311 bp, Artificial Sequence
  Description of Artificial Sequence: Synthetic polynucleotide
gcaacagtcctaacattcacctctcgtgtgtttgtgtctgttcgccatcccgtctccgctcgtcacttatccttcactttccagagggtccccccgcagaccccggtgaccctcaggtcggccgactgcggcagctggcgcccgaacagggaccctcggataagtgacccttgtctctatttctactattttgtgttcgtcttgttttgtctctatcttatctggctattatcacaagagcggaacggactcaccacagggaactgcagtctcgcctacagagaagaggtaggttacggtgagccattgga

SEQ ID NO: 1299 - DNA, 663 bp, Artificial Sequence
  Description of Artificial Sequence: Synthetic polynucleotide
gtacagttgtatagcagcacacgccttccctctttttcaccgcagctaagagagagaaagagagtatgtcagtcaagggcgtggagatgccagaaatgacgtgggacttggacgttggaaataaatggcggcgtcgaaaggccctgagtcgcattcaccggttctgggaatgtcgactacgggtgtggtggctgagtgacgccggcgtaagagaaaccgacccaccgcgtccccgacgccgcccgacttggatgaccgcggtgtttcacgttatctgtgccgttttgcttacgcttatgattatggccatcggcgcgctcatcgcgtacttaagatattaccaccaggacagttggcgagacatgctccacgatctattttgcggctgtcattatcctgagaagtgccgtcggcaccacgagcggcagagaagcagacggcgagccatggatgtgcccgacccggaactcggcgacccggcccgccggccgttgaacggggccatgtactacggcagcggctgtcgcttcgacacggtggaaatggtggacgagacgagacccgcgccgccggcgctgtcatcgcccgaaaccggcgacgatagcaacgacgacgcggttgccggcggaggtgctggcggggtaacatcatccgcgactcgta

SEQ ID NO: 1300 - DNA, 161 bp, Artificial Sequence
  Description of Artificial Sequence: Synthetic polynucleotide
ttttcaaaagttctctcctagaacttttcccacctctttcttgtcacttttgctagtttctctctgtttttctccattcttactagttggtgttgttcggttgtttggcttccctgctctttttccttccttccttcgcttttgttttggtttgctttacc

SEQ ID NO: 1301 - DNA, 101 bp, Artificial Sequence
  Description of Artificial Sequence: Synthetic polynucleotide
tagcttgtttgggttctttatcactgtcctgattaaggctgaatcagaacactttcacttccacacacacgacagtagtaagacacaaaatatagtagtta

SEQ ID NO: 1302 - DNA, 153 bp, Artificial Sequence
  Description of Artificial Sequence: Synthetic polynucleotide
actgggctgatgattatgactccgatgaggattacggtctggagagagaggctgcaacaaatgcgcccgcagagaaaactgctcaaacaaactcagcagagaagactgctccatcaacttcagcagagaaaactgctccaacaaacaagcctt

SEQ ID NO: 1303 - DNA, 143 bp, Artificial Sequence
  Description of Artificial Sequence: Synthetic polynucleotide
aaataacaaatctcaacacaacatatacaaaacaaacgaatctcaagcaatcaagcattctacttctattgcagcaatttaaatcatttcttttaaagcaaaagcaattttctgaaaattttcaccatttacgaacgatagca

SEQ ID NO: 1304 - DNA, 449 bp, Artificial Sequence
  Description of Artificial Sequence: Synthetic polynucleotide
gcgaattcaaacgagatgcctaagagtttggattcgctagctgtccggatggtagtgttacctgtggtccaccacggtaaagcattaagggctagccttaacctcactggaattgaatgaaagtgggagatcagtggcctccaacggttggactgactggacggggggtaatcgagtgggagtcccccacatcctacatttatgtagttcctcacgatccacagcaatcgtctggttgtatccaggttactgccgcgagcgtaagggagtgttttggcagacacaatccaatatgctgactacggtcggtgtggaggatccgaaacgtaagcaagtttcttgttactattgatcaacagctacatcctacaacgacagctatcataccagccatctttaacccaagaattccacgtgaacataccttgagtatacaattcttgagcaaa

SEQ ID NO: 1305 - DNA, 297 bp, Artificial Sequence
  Description of Artificial Sequence: Synthetic polynucleotide
accatcaacactccaggctcatggattaagttaggttccgccgaagcgggctaaccaggcccctagtaggaggcgcctatcccatgagccctttccccacagattgagtggagctggagctgggaaggaccgagtacggtccaatcgagaagaaccctgatgaacattccaggcctcttcggtagatttgggtatacccaccagtgaaggcggggtcgtgggcacaggccccctagtccacacagcctgatagggtcctgccgcaggatctgtgggtgcggctgtacatgtaacatg

SEQ ID NO: 1306 - DNA, 739 bp, Artificial Sequence
  Description of Artificial Sequence: Synthetic polynucleotide
aaaattaaagatcatattacataaaataacataatataaaatcacttaaaatcatgtgttttaaactacgcttagtttaattagttttggtgcgtttagcgattcgtcattgtacatggtgtgttgtgtgttttatgattttagtatgtttcttaaattattgaagccctataaggaccggctataaacgtcctgttttcaagtgggaaaagaaaccactcgccttaccactagctgggatctagctagagctccggcgtaaaacgagctacgcttttggatgcagcgttacgcattcctgggcttaggcgattgtactacaatgggtagcccccagtgccagtttttggcccgctattgtattacaattcggttaagttaacttggttggaaacaagccaaatgctagctatcattcgcattcggacatgaggaaggtgaacgcagtgaatcatagtggtggtacgctcttggggtggttcccaagacttcgtagggctatggttagctgttagtaagacctaatgttcgtttgtgatacagtcgaaagttgtttccgtatggagctcggtctgcgcgttaagcaccagcctgactatgggcagtatccctgtttttccactattctcactatcaaccacaacgcacgactttctgctctcttggcactttcttactttcacactctcgcgctcgtttcaaagttttattacttctctttttctcctgaccattcacg

SEQ ID NO: 1307 - DNA, 182 bp, Artificial Sequence
  Description of Artificial Sequence: Synthetic polynucleotide
gaaagttccacccctttccctttcattcacgactgactgccggcttggcccacggccaagtaccggcgactccgttggctcggagccagcgacagcccatcctatagcactctccaggagagaaacttagtacacagttgggggctcgtccgggatacgagcgcccctttattccctaggca

SEQ ID NO: 1308 - DNA, 310 bp, Artificial Sequence
  Description of Artificial Sequence: Synthetic polynucleotide
caacagtcctaacattcacctctcgtgtgtttgtgtctgttcgccatcccgtctccgctcgtcacttatccttcactttccagagggtccccccgcagaccccggtgaccctcaggtcagccgactgcggcagctggcgcccgaacagggccctcggataagtgacccttgtctctatttctactatttggtgttcgtcttgtattgtctctttcttgtctggctatcatcacaagagcggaacggactcaccatagggagctgcagtcccgcctacggagaagaggtaggttatggtgagccattggat

SEQ ID NO: 1309 - DNA, 120 bp, Artificial Sequence
  Description of Artificial Sequence: Synthetic polynucleotide
gagaattagataaatgggaaaaaattcggttaaggccagggggaaagaaacaatataaactaaaacatatagtatgggcaagcagggagctagaacgattcgcagttaatcctggccttt

SEQ ID NO: 1310 - DNA, 122 bp, Artificial Sequence
  Description of Artificial Sequence: Synthetic polynucleotide
gaagccttagataagatagaggaagagcaaaacaaaagtaagaaaaaggcacagcaagcagcagctgacacaggaaacaacagccaggtcagccaaaattaccctatagtgcagaacctcca

SEQ ID NO: 1311 - DNA, 119 bp, Artificial Sequence
  Description of Artificial Sequence: Synthetic polynucleotide
ggaaagagagtttcaacgttagtggtaacccacgagcggagagctcttacggaggagctctccgtcgatggcgaaagccctttctaacaaacaaccaacaattcttatctacatgaatc

SEQ ID NO: 1312 - DNA, 389 bp, Artificial Sequence
  Description of Artificial Sequence: Synthetic polynucleotide
acctccgtgctatgcacggtgcgttgtcagcgttttgcgcttgcatgcgctacacgcgtcgtccaacgcggagggattcttccacattaccatgtgtcactccccctatggagggttccaccccgcccacacggaaataggttaaccatacctatagtacgggtgagcgggtcctcctagggcccccccggcaggtcgagggagctgaaattcgtgaatccgtgagtacacggaaatcgcggcttgaacgtcatacgtgaccttcggagccgaaatttgggcgtgccccacgaaggaaggcgggggcggtgttgggccgccgccccctttatcccacggtctgataggatgcttgcgagggcacctgccggtctcgtagaccataggac

SEQ ID NO: 1313 - DNA, 372 bp, Artificial Sequence
  Description of Artificial Sequence: Synthetic polynucleotide
tgaaaactagcccacctgcaaccaccaatcgggctaggatcacgaagaaccagggctgccccccgcaactgcgcggcgggtttccgcgaacgtttatctgttggtattctagtgtggaccggttaggcgccggtaaacaatttccatcacacttgattccttgtcgggaatctagatcgccgccccaccgtatggtggatcccgggtcgaaggtgaggtgtattttgtggtaggggagggtggtcacctgttggtggctccgttgatcctaccctgagtacgctccgacggaaattgcttacattcgacaaaatcgcctgcaaccgaaacttcccacaccgaaccaaccaaggccagtctccgccacttgcc

SEQ ID NO: 1314 - DNA, 289 bp, Artificial Sequence
  Description of Artificial Sequence: Synthetic polynucleotide
gaaatttagggcacacacgaactctcagttcttgcccgcacggtagtccgatgcctacgctcccctgggggctatcgaggcggcaacatgggtgtgttttcggtgttcaagaagagcctgtcgtctcccaagcgactagggttgcctcgcactgtatagtgtagttcgcgacccgaagagcaagggtggtgttggttggcgagggggggcttcggccttccgttgacccaactgatatcacacttatcttcttgactcaacggatttgaaaaacgaaccctaaatttcc

SEQ ID NO: 1315 - DNA, 293 bp, Artificial Sequence
  Description of Artificial Sequence: Synthetic polynucleotide
gataaaaacaaaaaatccctaggcatggcaagaaaactaagaacaatgcagtttgaatagatttaaaaacaattaatttgtttaatttaatttaacatttgaactgtctggcacagttagactgtcgagccgtctgatgagtagcacctcagggtcacgaaacgctggacgtaacggcggaacagattattgaggttagtagaacactttcagaacacaacaacacaacaaacaaatacaacacaacaacacaacacaacaacacaacacaacaacactgtcaaacaaacaag

SEQ ID NO: 1316 - DNA, 215 bp, Artificial Sequence
  Description of Artificial Sequence: Synthetic polynucleotide
caaaagaacgattcaaagcaattgcatccactaaaaccctaccatgcaagccaccccactcacgacaaaccttagaacctaaccacaatgtctcactacgtcagtaacagtgagcagaagtatagtgagcgggaagctactttcatcgcgattcggggtgcagccaacgctgtgatcaatgcgagggcagaggctgattcgcttaaggtgtggga

SEQ ID NO: 1317 - DNA, 264 bp, Artificial Sequence
  Description of Artificial Sequence: Synthetic polynucleotide
ccggcagttagtcgtgaatgaaagggaaaggggtggaactttcgatctgtagcggcgcagaacagaaaacgaaacaaagacgcagagttgagcaagcagggtcaggcaaagcgtggagagccggctgagtctaggcaggctccaagggagcgccggacaaaggcccggtctcgacctgagctctgaacttacctagacggcggacgcagttcaggaggcaccacaggcgggaggcggcagaacgcgactcaaccggcgtggatg

SEQ ID NO: 1318 - DNA, 96 bp, Artificial Sequence
  Description of Artificial Sequence: Synthetic oligonucleotide
agttgttagtctacgtggaccgacaaagacagattctttgagggagctaagctcaacgtagttctaacagttttttaattagagagcagatctctg

SEQ ID NO: 1319 - DNA, 107 bp, Artificial Sequence
  Description of Artificial Sequence: Synthetic polynucleotide
agttgttgatctgtgtgaatcagactgcgacagttcgagtttgaagcgaaagctagcaacagtatcaacaggttttattttggatttggaaacgagagtttctggtc

SEQ ID NO: 1320 - DNA, 297 bp, Artificial Sequence
  Description of Artificial Sequence: Synthetic polynucleotide
tctctccaagcccatttacaggcactctacctggtccagcacgaagtctggagaccgttggcggcagcttaccaagaacaactggaccggccggtagtgcctcaccctttccgagtcggtgacacagtgtgggtccgcagacaccaaactaaaaatctagaaccccgctggaaaggaccttataccgtcctactgactacccccaccgctctcaaagtggacggcattgcagcgtggatccacgctgcccacgtaaaggctgccgacaccaggattgagccaccatcggaatcgaca

SEQ ID NO: 1321 - DNA, 311 bp, Artificial Sequence
  Description of Artificial Sequence: Synthetic polynucleotide
tcatatgataaaccctgagctttattgtgtgaccccctgagatttcgattgcgaaaacttgctattttttgaattgcgacgtgtagaaccacttacaaaactttttgaaaggattgtttagctaggattcacgcgttgtacgagcttgcatacaagatgcaagattcctcttgtgaggaccctgggagttcccctcccaaccaaagtgtggcacttccacgagagagtatactctctggggtgctacggaaaaataatgtagcagaatgtgatgtacctaagagtaaatccattctcaaaaataaaacgac

SEQ ID NO: 1322 - DNA, 438 bp, Artificial Sequence
  Description of Artificial Sequence: Synthetic polynucleotide
cccaggagaaaaggcaattgtggtaagtgatgttagtcattggcagttgaaacctgcccaaaacatcctaggtctacgctgtgcgggccgaagtaagtctgggaacaacagggagtatgctgttttctgctttcacccaacacgaccgtacacgaaagagctagaggcatctggaggcaaagggaaaagaatttcttagcccgaatgttcatttgagtccttgacgaatgcgtcccttctgtcccgaaggtgaggcgtatggcgcatgctcatggcattactccaaggtgtatctagaggggggggggccccctctacttagtctagtgctacctgacagggccgcggctggtcgtttgtgtatggtataaccagtagtaatcccccatggattgctttaacccccccttcccccttcacaagacattctctaagatg

SEQ ID NO: 1323 - DNA, 614 bp, Artificial Sequence
  Description of Artificial Sequence: Synthetic polynucleotide
gtttttatgtctacttccacaagggggtggtgctcggcgagcatgttctgtaactgcccttgctagggttcttcacacgagcctcgccttattaaatgtgagttcggcaatgcttacgatctgccgaaacaagtttttatgtctacttccacattcaagcgctttctcatagggattctcattaaagacaagttcggtaacgctttcgattagaaactgttttaggtgcccttatattacaccttacgaggatctccttaaattcgagtccagtaattcctttgagtgacgggaagccttacgagttgcccccccccccccaaaaaaaaaaacaaaaaaaaactgtcttataaggagcatggctaaatgcgacttcggtagtgctttcgacctagcaatctctttttttttttgatttaatctcccttgttaagatatgatgcaataaatacacgacatgaaactttcatttattgacgaattgcaccatttaaactatttgggcgttgttgcacgattatggttatactttacctgcttttgctgcgtagctgttttgtgacgtcaggtttgcaactcctccatcaacgtccccgcgcttccgtctttgtaca

SEQ ID NO: 1324 - DNA, 42 bp, Artificial Sequence
  Description of Artificial Sequence: Synthetic oligonucleotide
ctgcgtctttgtttcgttttctgttctgcgccgctacaaatc

SEQ ID NO: 1325 - DNA, 447 bp, Artificial Sequence
  Description of Artificial Sequence: Synthetic polynucleotide
tgaattcaaacgagatgcctatgagtttggattcgctagctgttgggatggtagcgttacttgtggactactacagtaaagcattaagggctagccttaactccactggaattgatagaaggtggggagatcagtggccttcaacggttgaactgactggacggggggtaatcgagtgggagtcccccacattctgcatttgcagttcctcacgatccacagcgatcgtctgattgtacccaggttactgccgcgagcgtaagggagtgttttggcagacacagtctaagacgctgactacggtcggtgtcaaggatccgaaacgtaagcaagtttcttgttactattgatcaacagctacatcctacaacaacagcaaacatatcgtccatcctcaacccaagaattccacgtgaacataccctgagtatacaattcttggacagg

SEQ ID NO: 1326 - DNA, 495 bp, Artificial Sequence
  Description of Artificial Sequence: Synthetic polynucleotide
gcctatgggtggtctacataggtgagcatgcgttgctcgatatagaccgccattattggtaacacgcttgaagtgttctcatccggagaaagtgatttgctttcttccatgaggctccctggagggattgtccaataatggttgataattttggttgctgcacaaccggggctttgcccggggatttcatcccgttcaaggtgaggcccttgtagtaacctctccccgctgcgtgagcgaatacataagttcacccagtactgacagtgtcagcgccgcacgtgcgtgaaacgtgtgactcgcagactgaagcgacctatggtgaaaacggatgtaccatctagctgtggagtagtgaccctagaagctaatccgatggttccaccagtcgttgtttgccggcaaacgccacaaacggtttcgtgctttgcgtgaagaagcacggtctcttaagagttcattggtacggttgaccccgaacgaggtccgaacata

SEQ ID NO: 1327 - DNA, 487 bp, Artificial Sequence
  Description of Artificial Sequence: Synthetic polynucleotide
  modified_base (1)..(1): a, c, t, g, unknown or other
ncctatgggttggtctacataggtgtgtcgggagcgacacgtatagaccatttcagtagttccgcgctaaaagcgactcctttggaatcggtgatttgccgattacatggaggctccctggagggattgcctatctgaaagataagatggctgctgcacagccgtgggcgaaacgtttgcgtttacaacgcgtaggagaggtcctaacaaacaacctctaacgtggtccaggtggtgacactctccattccgtcaaggacgaagctcgtccgtgaaacgagtgactcgcaccctgaatgagaagagagaataacggatgcttctggtagttgtggagtagtgaccctagaaactaatccccagaagacctctcgctcatggatgccggaccaggtccacacctagtttaggtgttttgatggtaaaagaaacaccgcagactctgtcttgacatgaccggttgaccccgtacgaggtccgacttata

SEQ ID NO: 1328 - DNA, 369 bp, Artificial Sequence
  Description of Artificial Sequence: Synthetic polynucleotide
gggggttagagaaatcttgggagatttctatcgtcatagacatatgtgatgtacttacgtctctaggacgcctatgactggtttatactctgtcgagttgaacgtctggtggttcctacgtataagaactgcagtcttatgtgtgaaaccctacccctcgctaaccgagaacggttgtgtgatttgaggaacgttcgctgtttaaacttctttggaggaactttaaattgtattaattttgcatttgcaagagttagcccatctctaaaatgaggctatcgctgtgaacagccttaaagaccctctgggcaaactgattatgaattgagagttagacttctcagaaaaagtctggtcttgtcctagatt

SEQ ID NO: 1329 - DNA, 1532 bp, Artificial Sequence
  Description of Artificial Sequence: Synthetic polynucleotide
taatacgactcactatagggccatcagtcgccggtcccaagcccggataaaatgggagggggcgggaaaccgcctaaccatgccgactgatggcaggcggccgcgtcgacgggcccgcggaattccgccccccccccctctccctcccccccccctaacgttactggccgaagccgcttggaataaggccggtgtgcgtttgtctatatgttattttccaccatattgccgtcttttggcaatgtgagggcccggaaacctggccctgtcttcttgacgagcattcctaggggtctttcccctctcgccaaaggaatgcaaggtctgttgaatgtcgtgaaggaagcagttcctctggaagcttcttgaagacaaacaacgtctgtagcgaccctttgcaggcagcggaaccccccacctggcgacaggtgcctctgcggccaaaagccacgtgtataagatacacctgcaaaggcggcacaaccccagtgccacgttgtgagttggatagttgtggaaagagtcaaatggctctcctcaagcgtattcaacaaggggctgaaggatgcccagaaggtaccccattgtatgggatctgatctggggcctcggtgcacatgctttacatgtgtttagtcgaggttaaaaaaacgtctaggccccccgaaccacggggacgtggttttcctttgaaaaacacgatgataatatggccacaaccatggtgagcaagggcgaggagctgttcaccggggtggtgcccatcctggtcgagctggacggcgacgtaaacggccacaagttcagcgtgtccggcgagggcgagggcgatgccacctacggcaagctgaccctgaagttcatctgcaccaccggcaagctgcccgtgccctggcccaccctcgtgaccaccctgacctacggcgtgcagtgcttcagccgctaccccgaccacatgaagcagcacgacttcttcaagtccgccatgcccgaaggctacgtccaggagcgcaccatcttcttcaaggacgacggcaactacaagacccgcgccgaggtgaagttcgagggcgacaccctggtgaaccgcatcgagctgaagggcatcgacttcaaggaggacggcaacatcctggggcacaagctggagtacaactacaacagccacaacgtctatatcatggccgacaagcagaagaacggcatcaaggtgaacttcaagatccgccacaacatcgaggacggcagcgtgcagctcgccgaccactaccagcagaacacccccatcggcgacggccccgtgctgctgcccgacaaccactacctgagcacccagtccgccctgagcaaagaccccaacgagaagcgcgatcacatggtcctgctggagttcgtgaccgccgccgggatcactctcggcatggacgagctgtacaagtaaaaaactgccatcagtcggcgtggactgtagaacactgccaatgccggtcccaagcccggataaaagtggagggtacagtccacgctttttt

SEQ ID NO: 1330 - DNA, 4625 bp, Artificial Sequence
  Description of Artificial Sequence: Synthetic polynucleotide
taatacgactcactatagggccatcagtcgccggtcccaagcccggataaaatgggagggggcgggaaaccgcctaaccatgccgactgatggcaggcggccgcgtcgacgggcccgcggaattccgccccccccccctctccctcccccccccctaacgttactggccgaagccgcttggaataaggccggtgtgcgtttgtctatatgttattttccaccatattgccgtcttttggcaatgtgagggcccggaaacctggccctgtcttcttgacgagcattcctaggggtctttcccctctcgccaaaggaatgcaaggtctgttgaatgtcgtgaaggaagcagttcctctggaagcttcttgaagacaaacaacgtctgtagcgaccctttgcaggcagcggaaccccccacctggcgacaggtgcctctgcggccaaaagccacgtgtataagatacacctgcaaaggcggcacaaccccagtgccacgttgtgagttggatagttgtggaaagagtcaaatggctctcctcaagcgtattcaacaaggggctgaaggatgcccagaaggtaccccattgtatgggatctgatctggggcctcggtgcacatgctttacatgtgtttagtcgaggttaaaaaaacgtctaggccccccgaaccacggggacgtggttttcctttgaaaaacacgatgataatatggccacaaccatgttcgtgttcctggtgctgctgcccctggtaagctcacagtgcgtgaacctgaccacaagaacacagctgcctcctgcttacaccaacagcttcacaaggggcgtgtactaccctgataaagtgttcagaagcagcgtgctgcacagcacacaggacctgtttctccctttcttcagcaacgtgacctggttccacgtgatcagcggcactaacggcaccaagagatttgacaaccctgtgctgccttttaacgacggcgtttacttcgccagtatcgagaagagcaacatcatacggggatggatcttcggcaccaccctggatagcaagacccagagcctgctgatcgttaacaacgccaccaacgtcgtgatcaaggtgtgcgagttccagttttgcaatgatcccttcctggaccacaagaacaacaagagctggatggaatccgagttcagagtgtacagctccgccaataactgcacattcgagtacgtctcacagccctttctgatggacctggaaggcaagcagggcaacttcaagaaccttagagagttcgtgtttaagaacatcgatgggtacttcaaaatctactctaagcacacccctatcatcgtgcgggagcctgaggacctgccacagggcttttctgccctggaacctctggtcgatctgcccatcggaatcaacatcacaagattccagactctgctggctttgcacagaagctacctgacccccggcgacagcagcagcggctggaccgctggcgctgcggcgtactacgtgggctacctgcaacctagaacgttcctgctgaagtacaatgagaacggcacaatcacagacgccgtggactgtgccctggaccccctgtctgaaaccaagtgtacactgaagagcttcaccgtggagaagggcatttaccagacatctaattttcgggtgcagcctaccgagtcgatcgtgcggttcccgaacattacaaacctgtgccccttcgacgaggtgtttaacgccacccgcttcgccagcgtgtacgcctggaacagaaagagaatcagcaactgcgtagctgattactccgtgctgtacaacctggccccatttttcaccttcaagtgctacggagtgagcccaaccaagctgaatgacctttgtttcactaacgtgtacgctgactccttcgtgatcagaggcgacgaagtgcggcagatcgcacctggccagacaggcaacatcgccgactacaactacaaactgccagatgacttcaccggctgtgtgatcgcgtggaatagtaacaagctggattccaaagtgtccggaaactataactacctgtaccgactgttccggaagagcaatctgaagcccttcgagagagacatcagcaccgaaatctaccaggccggaaataaaccttgtaacggcgttgctggatttaactgctactttcctctgaggagctacagctttagacccacatacggcgttggccaccagccctaccgggtggtggtgctgagcttcgaactgctgcatgcccctgctacagtgtgcggccctaagaaatcgaccaacctggtgaagaacaagtgcgtgaactttaacttcaacggtctgaagggcacaggcgtgctgaccgagagcaacaaaaagttcctgccattccaacagttcggcagagacatcgccgacaccaccgacgcagtgcgggacccgcaaaccttggaaatcctggacattaccccttgcagctttggcggcgtcagcgtcatcacacctggcacaaacaccagcaatcaggtggccgtgctgtaccagggcgtgaactgtaccgaggtgcctgtagccatccacgccgaccagctgacccccacatggagggtgtacagcacaggcagcaacgtattccagaccagagccggctgtctgatcggtgctgaatacgtgaacaattcctacgagtgcgacatccctatcggcgccggcatctgcgccagctaccaaacccagaccaagagccacagaagagccagaagtgttgccagccagagcatcatcgcctatacgatgagcctgggcgcagaaaacagcgtggcctacagcaacaactctatcgccatccctacaaactttaccatctctgttaccactgagatcctgcccgtaagcatgaccaagacctctgtggattgtaccatgtacatctgcggagattctaccgaatgtagcaacctgctgctgcaatacggcagcttttgcacacagctaaagcgggctctgaccggaattgccgtggaacaggacaagaacacccaggaggtgttcgcccaagtgaaacaaatctacaagacacctccaatcaagtacttcggcggttttaatttcagccaaattctgcctgacccatctaagcctagcaaacggagcttcatcgaggacctactgttcaacaaggtgaccctggccgatgccggcttcatcaagcagtacggcgactgcctgggcgacatcgccgctagagacctgatctgtgcccaaaaattcaaaggactgaccgtgctgcctcctctgctgacggatgaaatgatcgcccagtacacaagcgccctgctggccggcacaatcaccagcggctggaccttcggggccggcgccgccctgcaaatccctttcgccatgcagatggcctatcggttcaacggcattggcgttacccagaacgtcctgtacgagaaccagaaactgatcgccaaccagttcaactctgccatcggcaagatccaggactctctgagcagcacagccagcgccctcggaaagctccaagacgtggttaatcacaacgcccaggccctgaataccctggtgaagcagctgagcagcaagttcggcgccatctcatctgtcctgaacgacatcttcagcagactggatcctccagaggccgaggtgcagatcgacagactgatcaccggaagactgcaaagcctccagacctacgtgacacagcagctgatcagagccgctgaaatcagagcctctgctaatttggccgccacaaagatgagcgagtgcgtgctgggccaaagcaaacgggtggacttctgcggcaagggataccacctgatgagcttccctcagagcgctcctcacggcgtggtgttcctgcacgtgacctacgtgcccgcccaggagaagaacttcaccaccgcccctgccatctgccacgacggcaaggcccacttcccccgggagggcgtgttcgtgtccaatggaacacactggttcgtgacccagagaaacttctacgaacctcagatcatcaccacggacaacaccttcgtgtctggcaactgcgatgtggtgataggcatcgtgaacaacaccgtatacgaccctctgcaacctgagctggacagttttaaagaggaactggacaaatacttcaagaatcataccagccccgatgtggatctgggcgacatcagcggcatcaacgcctctgtcgtgaatatccagaaggaaatcgatcgcctgaacgaggtggccaagaatctgaacgagagcctgatcgatctccaggagctgggaaagtacgagcagtatatcaagtggccttggtacatctggctgggtttcatcgccggcctgatcgccatcgtgatggtgaccatcatgctgtgctgcatgacctcctgttgtagctgcctgaagggctgctgtagctgcggcagttgctgtaaattcgacgaggatgattccgagcccgtgctgaagggcgttaagctgcactacacataaaaaactgccatcagtcggcgtggactgtagaacactgccaatgccggtcccaagcccggataaaagtggagggtacagtccacgctttttt

SEQ ID NO: 1331 - DNA, 720 bp, Artificial Sequence
  Description of Artificial Sequence: Synthetic polynucleotide
atggtgagcaagggcgaggagctgttcaccggggtggtgcccatcctggtcgagctggacggcgacgtaaacggccacaagttcagcgtgtccggcgagggcgagggcgatgccacctacggcaagctgaccctgaagttcatctgcaccaccggcaagctgcccgtgccctggcccaccctcgtgaccaccctgacctacggcgtgcagtgcttcagccgctaccccgaccacatgaagcagcacgacttcttcaagtccgccatgcccgaaggctacgtccaggagcgcaccatcttcttcaaggacgacggcaactacaagacccgcgccgaggtgaagttcgagggcgacaccctggtgaaccgcatcgagctgaagggcatcgacttcaaggaggacggcaacatcctggggcacaagctggagtacaactacaacagccacaacgtctatatcatggccgacaagcagaagaacggcatcaaggtgaacttcaagatccgccacaacatcgaggacggcagcgtgcagctcgccgaccactaccagcagaacacccccatcggcgacggccccgtgctgctgcccgacaaccactacctgagcacccagtccgccctgagcaaagaccccaacgagaagcgcgatcacatggtcctgctggagttcgtgaccgccgccgggatcactctcggcatggacgagctgtacaagtaa

SEQ ID NO: 1332 - DNA, 1062 bp, Artificial Sequence
  Description of Artificial Sequence: Synthetic polynucleotide
atggactataaggatcacgacggcgattataaagaccacgacattgattataaggatgatgatgacaaaatggcacccaagaagaaacgcaaggtgggtatccatggtgtgccggccgcgatggcggaacgaccatttcaatgccgcatttgtatgcgaaatttcagcgatcggtctaatttgtcaaggcacattcgcacacacacaggagagaaaccgttcgcctgtgacatatgtggtaggaagtttgccataagttccaacctgaatagccatacaaaaatccatactgggtctcaaaagccatttcagtgcagaatatgtatgcggaatttctcacggtccgacaatctggcacggcatatcagaactcacacgggggagaaacctttcgcatgcgatatatgtgggcgcaagtttgccacatcagggaatctgacgcgccacacgaaaatccatcttaggggttcacagctggtcaagtctgagctcgaggagaaaaaatcagaattgaggcacaaattgaagtatgttccgcacgaatatatagaactcatagaaatcgcaagaaattctactcaagaccggatcctcgagatgaaggtgatggaattctttatgaaggtctacggatacaggggtaagcatttgggaggttcacggaaacccgatggggccatatacacagtgggtagccctatcgattatggggtcattgttgatactaaagcatattcaggagggtataatcttccgattggacaggcagatgaaatgcagagatatgttgaggagaaccaaaccaggaacaaacacataaaccccaacgaatggtggaaagtttacccgagtagcgtaactgagttcaagttcctgttcgtgtcaggtcatttcaaggggaactacaaggcccaattgacgagactgaatcatatcacgaattgtaatggtgcggtcctctctgttgaagagctgcttataggtggggagatgataaaggccggtacattgactctggaggaagtcagaaggaaatttaacaatggggaaataaacttttaa

SEQ ID NO: 1333 - DNA, 1059 bp, Artificial Sequence
  Description of Artificial Sequence: Synthetic polynucleotide
atggactacaaggatcatgacggtgattacaaagaccatgatatagactacaaggatgatgacgacaaaatggctccgaagaaaaaacgaaaggtaggtatccatggagtcccggcggcgatggcggaaaggccttttcagtgccggatatgcatgcgcaacttttcacgctcagataacctttcagtacatatacgcactcacacgggagaaaagccctttgcgtgcgacatctgtgggaggaagttcgctcaaaagatcaatttgcaagttcataccaaaatacacacgggcgagaaacccttccagtgccgaatatgtatgaggaacttctctagatccgatgtactctctgaacacataagaactcacactggcgagaagccatttgcttgcgatatatgcggacgaaaattcgcgcaaagaaaccaccggaccactcatacaaagatacacctccgaggcagccagcttgttaaatcagagctcgaggaaaagaaaagcgaactccgacacaagctgaaatatgttcctcatgaatatattgaattgatcgaaatagcgcgaaacagcacccaggatagaattttggaaatgaaggttatggaattcttcatgaaggtgtacggatacagaggcaagcacctgggggggtccagaaaaccagacggagctatatacacagtgggcagcccaatagattatggagtcatagtggatactaaagcatatagcggtggttacaatcttccgatagggcaggcagatgagatgcaacgctacgtagaggagaaccaaacccggaacaaacatattaacccaaatgagtggtggaaggtctatccatcaagcgtgaccgagtttaagttcctgtttgtgtcaggacatttcaagggaaactataaagctcaactgacacggctgaatcatataactaactgcaatggggctgtactgtccgttgaagagctgttgataggaggtgagatgattaaagccggcactctgacattggaagaagttcgacgcaaattcaacaatggggaaataaacttctaa

SEQ ID NO: 1334 - DNA, 891 bp, Artificial Sequence
  Description of Artificial Sequence: Synthetic polynucleotide
atggattataaagacgacgatgatccgaagaaaaagcggaaagttccgtttcaatgtaggatttgtatgcggaacttctctacgcgacagaaactgggggtccacactaggacccataccggggagaaaccattccaatgtcggatctgcatgagaaatttctccgtggcacacaaccttacgcgccatcttcggactcataccggagagaagccattccagtgtcggatatgtatgcgaaatttctctcaacacccaaacttgaccagacatctgaaaacgcacacgggacaaaaggaccaactcgtgaagagtgagcttgaggagaaaaagagtgaattgagacataagcttaaatatgtcccgcacgagtacatcgaattgatcgagatagcgcggaacagtacacaagaccgaatccttgaaatgaaggttatggaattctttatgaaagtttacggctacagaggcaaacatttgggaggaagcaggaaaccagacggggcaatatatacggtggggagccctattgactatggagttatagtagatacaaaggcatacagtggtggctacaacctcccaattggtcaggccgacgagatgcagcgatacgttgaggaaaatcaaactagaaacaaacatattaaccccaatgagtggtggaaagtatatccgtctagtgtaactgaattcaaatttcttttcgtgagcgggcatttcaaaggaaactacaaggcgcaactcaccagacttaaccatatcacaaattgtaacggagccgttttgtccgtggaggagttgcttattggaggagagatgattaaggcgggaactctcaccttggaggaagttcgcagaaagtttaataatggggaaatcaatttctaa

SEQ ID NO: 1335 - DNA, 891 bp, Artificial Sequence
  Description of Artificial Sequence: Synthetic polynucleotide
atggattacaaagacgatgatgatcccaaaaagaagcggaaggttccgttccaatgcagaatctgcatgcgaaattttagcgctcccagtaaacttgacaggcatacacggacccacaccggagaaaagcctttccagtgcaggatatgcatgagaaatttttctgaccgatccaaccttactaggcacctccgaacacataccggggagaagcccttccaatgtcggatatgcatgcgcaacttttctgaggggggtaatttgatgcggcatctgaagacacataccggccaaaaggatcaacttgttaaatcagagcttgaagaaaaaaagtccgaactccggcataaactcaaatacgttccccacgaatacatcgaacttattgaaattgcgagaaatagcactcaggataggattctggaaatgaaagtgatggaattttttatgaaggtttacggatacagggggaaacacttgggaggctctagaaaacctgacggtgccatatacaccgtgggcagcccaattgactatggcgttatcgtagacactaaagcatattcaggtggttataacttgcccatcggacaggctgatgagatgcaacgatatgtggaggagaaccagacgagaaacaagcacatcaaccccaatgaatggtggaaggtctacccgagttctgtgaccgagttcaagttcctgtttgtcagtggtcacttcaaaggaaactacaaagcacagctcacgcgactgaatcacataacaaattgcaatggtgccgtactgtccgtagaagaacttctgattggtggagagatgattaaggccggtacactcacccttgaggaggtgaggaggaaattcaataatggagagataaacttctaa

SEQ ID NO: 1336 - DNA, 1239 bp, Artificial Sequence
  Description of Artificial Sequence: Synthetic polynucleotide
atggattataaggatcacgatggtgactacaaagaccatgatatagactacaaagatgacgacgacaagatggccccgaaaaagaagaggaaagtcgggatacatggtgttcccgctgcgatggcagaaagacccttccaatgtcgcatttgcatgcggaacttctctcacgggcagactttgaatgaacatatcaggacacacaccggtgaaaagcctttcgcatgtgatatctgcggcagaaaattcgcacaaagtggcaacttggcccggcatacgaaaatccacaccggtagccaaaaaccatttcaatgtagaatttgcatgcgcaatttctccaggtcagataacctgagtgagcacatccggacccacactggggaaaagccttttgcgtgcgatatttgcggacggaaatttgcctcaaaacaatacctgataaaacatacaaaaatacatacgggatctcagaaacctttccaatgtaggatctgcatgaggaatttttccgaccgctcccaccttactaggcatattaggacgcatacgggggaaaaaccgttcgcttgtgacatttgcggaaggaagttcgcgcaatctggtcacttgtcacgacacactaaaatacatctgcggggtagtcagttggtaaaatccgaacttgaggagaaaaagagtgagcttcgacataagttgaaatacgttccacacgagtatattgaactgatcgaaatagcacgcaacagcacgcaggataggatcttggaaatgaaagttatggaattttttatgaaggtttatggttaccggggaaaacatcttggggggagccggaagcctgacggtgcgatctacacagtggggtctccgatagactatggtgtaatcgtcgatacaaaggcctatagcgggggatataacttgccaatagggcaagcagacgaaatggaacgatacgtggaggagaaccaaacgcgagacaaacatctcaaccctaacgagtggtggaaagtgtatccttcctctgtgactgagttcaaattcctgttcgtctctggacactttaaggggaattataaggcacagttgacacggctgaatcacatcactaattgtaacggtgcggtactttctgtggaagaacttttgataggtggtgaaatgattaaggcaggaacactgactcttgaagaagtgagacggaaattcaacaacggggagattaactttagaagctaa

SEQ ID NO: 1337 - DNA, 1233 bp, Artificial Sequence
  Description of Artificial Sequence: Synthetic polynucleotide
atggattataaggaccacgatggggactacaaggaccatgacatagattataaggatgatgacgataagatggcccctaaaaagaaacgaaaggtaggcatccacggtgtgcccgcggcgatggcggaacggccttttcagtgcaggatttgcatgagaaatttctctgacagaagtaatttgagtcgacatatccggacgcataccggcgaaaagccatttgcctgcgacatatgcggaagaaaatttgctcagtctggtcaccttagtcggcatacaaagattcatacgggctctcaaaaaccattccagtgtagaatttgcatgcgaaacttttcagaccgcagtcacttgtcccgccatatacgaacccacacgggcgagaagcctttcgcgtgcgacatttgtggcaggaaattcgccacttccggtaatcttacccgacacactaaaatccatacgggatcccaaaagccgtttcaatgtcgaatttgcatgaggaacttttcccaatcaagcgatttgagtcggcacattcggacgcacaccggtgaaaagccctttgcgtgcgatatatgtggtcggaagtttgcgacaagcgggcatcttagccgacataccaaaatccatcttcggggttcccaattggtaaagtcagagctcgaagagaaaaagagtgagctgcggcacaagttgaaatacgtaccgcacgaatacatagaactcattgagattgcacgaaacagcacgcaggatagaatccttgagatgaaggtaatggaattcttcatgaaggtgtatgggtatagaggcaagcaccttggaggttcccgaaagccggatggtgccatatacactgttgggtccccaatcgactacggcgtgatagtagataccaaggcgtactcaggcgggtacaacctgccaataggtcaagcagatgagatgcagcgctacgttaaagaaaaccaaacgcgaaataagcatattaacccaaatgagtggtggaaggtgtacccctcctctgtgacagaattcaaattccttttcgtatccggccatttcaaaggcaattacaaagcccagctcacccgactgaaccggaagactaattgtaacggagccgtccttagtgtagaggagcttctcatagggggtgaaatgataaaagctggcacgctcaccctggaggaagttcgcagaaagttcaacaacggtgaaataaatttctaa

SEQ ID NO: 1338 - DNA, 4155 bp, Artificial Sequence
  Description of Artificial Sequence: Synthetic polynucleotide
atggacaagaagtacagcatcggcctggacatcggcaccaactctgtgggctgggccgtgatcaccgacgagtacaaggtgcccagcaagaaattcaaggtgctgggcaacaccgaccggcacagcatcaagaagaacctgatcggagccctgctgttcgacagcggcgaaacagccgaggccacccggctgaagagaaccgccagaagaagatacaccagacggaagaaccggatctgctatctgcaagagatcttcagcaacgagatggccaaggtggacgacagcttcttccacagactggaagagtccttcctggtggaagaggataagaagcacgagcggcaccccatcttcggcaacatcgtggacgaggtggcctaccacgagaagtaccccaccatctaccacctgagaaagaaactggtggacagcaccgacaaggccgacctgcggctgatctatctggccctggcccacatgatcaagttccggggccacttcctgatcgagggcgacctgaaccccgacaacagcgacgtggacaagctgttcatccagctggtgcagacctacaaccagctgttcgaggaaaaccccatcaacgccagcggcgtggacgccaaggccatcctgtctgccagactgagcaagagcagacggctggaaaatctgatcgcccagctgcccggcgagaagaagaatggcctgttcggaaacctgattgccctgagcctgggcctgacccccaacttcaagagcaacttcgacctggccgaggatgccaaactgcagctgagcaaggacacctacgacgacgacctggacaacctgctggcccagatcggcgaccagtacgccgacctgtttctggccgccaagaacctgtccgacgccatcctgctgagcgacatcctgagagtgaacaccgagatcaccaaggcccccctgagcgcctctatgatcaagagatacgacgagcaccaccaggacctgaccctgctgaaagctctcgtgcggcagcagctgcctgagaagtacaaagagattttcttcgaccagagcaagaacggctacgccggctacattgacggcggagccagccaggaagagttctacaagttcatcaagcccatcctggaaaagatggacggcaccgaggaactgctcgtgaagctgaacagagaggacctgctgcggaagcagcggaccttcgacaacggcagcatcccccaccagatccacctgggagagctgcacgccattctgcggcggcaggaagatttttacccattcctgaaggacaaccgggaaaagatcgagaagatcctgaccttccgcatcccctactacgtgggccctctggccaggggaaacagcagattcgcctggatgaccagaaagagcgaggaaaccatcaccccctggaacttcgaggaagtggtggacaagggcgcttccgcccagagcttcatcgagcggatgaccaacttcgataagaacctgcccaacgagaaggtgctgcccaagcacagcctgctgtacgagtacttcaccgtgtataacgagctgaccaaagtgaaatacgtgaccgagggaatgagaaagcccgccttcctgagcggcgagcagaaaaaggccatcgtggacctgctgttcaagaccaaccggaaagtgaccgtgaagcagctgaaagaggactacttcaagaaaatcgagtgcttcgactccgtggaaatctccggcgtggaagatcggttcaacgcctccctgggcacataccacgatctgctgaaaattatcaaggacaaggacttcctggacaatgaggaaaacgaggacattctggaagatatcgtgctgaccctgacactgtttgaggacagagagatgatcgaggaacggctgaaaacctatgcccacctgttcgacgacaaagtgatgaagcagctgaagcggcggagatacaccggctggggcaggctgagccggaagctgatcaacggcatccgggacaagcagtccggcaagacaatcctggatttcctgaagtccgacggcttcgccaacagaaacttcatgcagctgatccacgacgacagcctgacctttaaagaggacatccagaaagcccaggtgtccggccagggcgatagcctgcacgagcacattgccaatctggccggcagccccgccattaagaagggcatcctgcagacagtgaaggtggtggacgagctcgtgaaagtgatgggccggcacaagcccgagaacatcgtgatcgaaatggccagagagaaccagaccacccagaagggacagaagaacagccgcgagagaatgaagcggatcgaagagggcatcaaagagctgggcagccagatcctgaaagaacaccccgtggaaaacacccagctgcagaacgagaagctgtacctgtactacctgcagaatgggcgggatatgtacgtggaccaggaactggacatcaaccggctgtccgactacgatgtggaccatatcgtgcctcagagctttctgaaggacgactccatcgacaacaaggtgctgaccagaagcgacaagaaccggggcaagagcgacaacgtgccctccgaagaggtcgtgaagaagatgaagaactactggcggcagctgctgaacgccaagctgattacccagagaaagttcgacaatctgaccaaggccgagagaggcggcctgagcgaactggataaggccggcttcatcaagagacagctggtggaaacccggcagatcacaaagcacgtggcacagatcctggactcccggatgaacactaagtacgacgagaatgacaagctgatccgggaagtgaaagtgatcaccctgaagtccaagctggtgtccgatttccggaaggatttccagttttacaaagtgcgcgagatcaacaactaccaccacgcccacgacgcctacctgaacgccgtcgtgggaaccgccctgatcaaaaagtaccctaagctggaaagcgagttcgtgtacggcgactacaaggtgtacgacgtgcggaagatgatcgccaagagcgagcaggaaatcggcaaggctaccgccaagtacttcttctacagcaacatcatgaactttttcaagaccgagattaccctggccaacggcgagatccggaagcggcctctgatcgagacaaacggcgaaaccggggagatcgtgtgggataagggccgggattttgccaccgtgcggaaagtgctgagcatgccccaagtgaatatcgtgaaaaagaccgaggtgcagacaggcggcttcagcaaagagtctatcctgcccaagaggaacagcgataagctgatcgccagaaagaaggactgggaccctaagaagtacggcggcttcgacagccccaccgtggcctattctgtgctggtggtggccaaagtggaaaagggcaagtccaagaaactgaagagtgtgaaagagctgctggggatcaccatcatggaaagaagcagcttcgagaagaatcccatcgactttctggaagccaagggctacaaagaagtgaaaaaggacctgatcatcaagctgcctaagtactccctgttcgagctggaaaacggccggaagagaatgctggcctctgccggcgaactgcagaagggaaacgaactggccctgccctccaaatatgtgaacttcctgtacctggccagccactatgagaagctgaagggctcccccgaggataatgagcagaaacagctgtttgtggaacagcacaagcactacctggacgagatcatcgagcagatcagcgagttctccaagagagtgatcctggccgacgctaatctggacaaagtgctgtccgcctacaacaagcaccgggataagcccatcagagagcaggccgagaatatcatccacctgtttaccctgaccaatctgggagcccctgccgccttcaagtactttgacaccaccatcgaccggaagaggtacaccagcaccaaagaggtgctggacgccaccctgatccaccagagcatcaccggcctgtacgagacacggatcgacctgtctcagctgggaggcgacaagcgacctgccgccacaaagaaggctggacaggctaagaagaagaaataa

SEQ ID NO: 1339 - DNA, 4161 bp, Artificial Sequence
  Description of Artificial Sequence: Synthetic polynucleotide
atggacaagaagtacagcatcggcctggacatcggcaccaactctgtgggctgggccgtgatcaccgacgagtacaaggtgcccagcaagaaattcaaggtgctgggcaacaccgaccggcacagcatcaagaagaacctgatcggagccctgctgttcgacagcggcgaaacagccgaggccacccggctgaagagaaccgccagaagaagatacaccagacggaagaaccggatctgctatctgcaagagatcttcagcaacgagatggccaaggtggacgacagcttcttccacagactggaagagtccttcctggtggaagaggataagaagcacgagcggcaccccatcttcggcaacatcgtggacgaggtggcctaccacgagaagtaccccaccatctaccacctgagaaagaaactggtggacagcaccgacaaggccgacctgcggctgatctatctggccctggcccacatgatcaagttccggggccacttcctgatcgagggcgacctgaaccccgacaacagcgacgtggacaagctgttcatccagctggtgcagacctacaaccagctgttcgaggaaaaccccatcaacgccagcggcgtggacgccaaggccatcctgtctgccagactgagcaagagcagacggctggaaaatctgatcgcccagctgcccggcgagaagaagaatggcctgttcggaaacctgattgccctgagcctgggcctgacccccaacttcaagagcaacttcgacctggccgaggatgccaaactgcagctgagcaaggacacctacgacgacgacctggacaacctgctggcccagatcggcgaccagcaggccgacctgtttctggccgccaagaacctgtccgacgccatcctgctgagcgacatcctgagagtgaacaccgagatcaccaaggcccccctgagcgcctctatgatcaagagatacgacgagcaccaccaggacctgaccctgctgaaagctctcgtgcggcagcagctgcctgagaagtacaaagagattttcttcgaccagagcaagaacggctacgccggctacattgacggcggagccagccaggaagagttctacaagttcatcaagcccatcctggaaaagatggacggcaccgaggaactgctcgtgaagctgaacagagaggacctgctgcggaagcagcggaccttcgacaacggcagcatcccccaccagatccacctgggagagctgcacgccattctgcggcggcaggaagatttttacccattcctgaaggacaaccgggaaaagatcgagaagatcctgaccttccgcatcccctactacgtgggccctctggccaggggaaacagcagattcgcctggatgaccagaaagagcgaggaaaccatcaccccctggaacttcgaggaagtggtggacaagggcgcttccgcccagagcttcatcgagcggatgaccaacttcgataagaacctgcccaacgagaaggtgctgcccaagcacagcctgacctacgagtacttcaccgtgtataacgagctgaccaaagtgaaatacgtgaccgagggaatgagaaagcccgccttcctgagcggcgagcagaaaaaggccatcgtggacctgctgttcaagaccaaccggaaagtgaccgtgaagcagctgaaagaggactacttcaagaaaatcgagtgcttcgactccgtggaaatctccggcgtggaagatcggttcaacgcctccctgggcacataccacgatctgctgaaaattatcaaggacaaggacttcctggacaatgaggaaaacgaggacattctggaagatatcgtgctgacccagacactgtttgaggacagagagatgatcgaggaacggctgaaaacctatgcccacctgttcgacgacaaagtgatgaagcagctgaagcggcggagatacaccggctggggcaggctgagccggaagctgatcaacggcatccgggacaagcagtccggcaagacaatcctggatttcctgaagtccgacggcttcgccaacagaaacttcatgcagctgatccacgacgacagcctgacctttaaagaggacatccagaaagcccaggtgtccggccagggcgatagcctgcacgagcacattgccaatggagccggcagccccgccattaagaagggcatcctgcagacagtgaaggtggtggacgagctcgtgaaagtgatgggccggcacaagcccgagaacatcgtgatcgaaatggccagagagaaccagaccacccagaagggacagaagaacagccgcgagagaatgaagcggatcgaagagggcatcaaagagctgggcagccagatcctgaaagaacaccccgtggaaaacacccagctgcagaacgagaagctgtacctgtactacgaccagaatgggcgggatatgtacgtggaccaggaactggacatcaaccggctgtccgactacgatgtggaccatatcgtgcctcagagctttctgaaggacgactccatcgacaacaaggtgctgaccagaagcgacaagaaccggggcaagagcgacaacgtgccctccgaagaggtcgtgaagaagatgaagaactactggcggcagctgctgaacgccaagctgattacccagagaaagttcgacaatctgaccaaggccgagagaggcggcctgagcgaactggataaggccggcttcatcaagagacagctggtggaaacccggcagatcacaaagcacgtggcacagatcctggactcccggatgaacactaagtacgacgagaatgacaagctgatccgggaagtgaaagtgatcaccctgaagtccaagctggtgtccgatttccggaaggatttccagttttacaaagtgcgcgagatcaacaactaccaccacgcccacgacgcctacctgaacgccgtcgtgggaaccgccctgatcaaaaagtaccctaagctggaaagcgagttcgtgtacggcgactacaaggtgtacgacgtgcggaagatgatcgccaagagcgagcaggaaatcggcaaggctaccgccaagtacttcttctacagcaacatcatgaactttttcaagaccgagattaccctggccaacggcgagatccggaagcggcctctgatcgagacaaacggcgaaaccggggagatcgtgtgggataagggccgggattttgccaccgtgcggaaagtgctgagcatgccccaagtgaatatcgtgaaaaagaccgaggtgcagacaggcggcttcagcaaagagtctatcctgcccaagaggaacagcgataagctgatcgccagaaagaaggactgggaccctaagaagtacggcggcttcgacagccccaccgtggcctattctgtgctggtggtggccaaagtggaaaagggcaagtccaagaaactgaagagtgtgaaagagctgctggggatcaccatcatggaaagaagcagcttcgagaagaatcccatcgactttctggaagccaagggctacaaagaagtgaaaaaggacctgatcatcaagctgcctaagtactccctgttcgagctggaaaacggccggaagagaatgctggcctctgccggcgaactgcagaagggaaacgaactggccctgccctccaaatatgtgaacttcctgtacctggccagccactatgagaagggaaagggctcccccgaggataatgagcagaaacagctgtttgtggaacagcacaagcactacctggacgagatcatcgagcagatcagcgagttctccaagagagtgatcgctgccgacgctaatctggacaaagtgctgtccgcctacaacaagcaccgggataagcccatcagagagcaggccgagaatatcatccacctgtttaccctgaccaatctgggagcccctgccgccttcaagtactttgacaccaccatcgaccggaagaggtacaccagcaccaaagaggtgctggacgccaccctgatccaccagagcatcaccggcctgtacgagacacggatcgacctgtctcagctgggaggcgacaagcgacctgccgccacaaagaaggctggacaggctaagaagaagaaaggatcctaa

SEQ ID NO: 1340 - DNA, 7044 bp, Artificial Sequence
  Description of Artificial Sequence: Synthetic polynucleotide
atgaaccatgaccaggaatttgaccccccaaaggtttacccacctgtgccagctgagaagaggaagcccatccgcgtgctgtctctctttgatgggattgctacagggctcctggtgctgaaggacctgggcatccaagtggaccgctacattgcctccgaggtgtgtgaggactccatcacggtgggcatggtgcggcaccagggaaagatcatgtacgtcggggacgtccgcagcgtcacacagaagcatatccaggagtggggcccattcgacctggtgattggaggcagtccctgcaatgacctctccattgtcaaccctgcccgcaagggactttatgagggtactggccgcctcttctttgagttctaccgcctcctgcatgatgcgcggcccaaggagggagatgatcgccccttcttctggctctttgagaatgtggtggccatgggcgttagtgacaagagggacatctcgcgatttcttgagtctaaccccgtgatgattgacgccaaagaagtgtctgctgcacacagggcccgttacttctggggtaaccttcctggcatgaacaggcctttggcatccactgtgaatgataagctggagctgcaagagtgtctggagcacggcagaatagccaagttcagcaaagtgaggaccattaccaccaggtcaaactctataaagcagggcaaagaccagcatttccccgtcttcatgaacgagaaggaggacatcctgtggtgcactgaaatggaaagggtgtttggcttccccgtccactacacagacgtctccaacatgagccgcttggcgaggcagagactgctgggccgatcgtggagcgtgccggtcatccgccacctcttcgctccgctgaaggaatattttgcttgtgtgtctagcggcaatagtaacgctaacagccgcgggccgagcttcagcagcggcctggtgccgttaagcttgcgcggcagccatatgggccctatggagatatacaagacagtgtctgcatggaagagacagccagtgcgggtactgagcctcttcagaaacatcgacaaggtactaaagagtttgggcttcttggaaagcggttctggttctgggggaggaacgctgaagtacgtggaagatgtcacaaatgtcgtgaggagagacgtggagaaatggggcccctttgacctggtgtacggctcgacgcagcccctaggcagctcttgtgatcgctgtcccggctggtacatgttccagttccaccggatcctgcagtatgcgctgcctcgccaggagagtcagcggcccttcttctggatattcatggacaatctgctgctgactgaggatgaccaagagacaactacccgcttccttcagacagaggctgtgaccctccaggatgtccgtggcagagactaccagaatgctatgcgggtgtggagcaacattccagggctgaagagcaagcatgcgcccctgaccccaaaggaagaagagtatctgcaagcccaagtcagaagcaggagcaagctggacgccccgaaagttgacctcctggtgaagaactgccttctcccgctgagagagtacttcaagtatttttctcaaaactcacttcctcttggagggccgagctctggcgcacccccaccaagtggagggtctcctgccgggtccccaacatctactgaagaaggcaccagcgaatccgcaacgcccgagtcaggccctggtacctccacagaaccatctgaaggtagtgcgcctggttccccagctggaagccctacttccaccgaagaaggcacgtcaaccgaaccaagtgaaggatctgcccctgggaccagcactgaaccatctgagatggacaagaagtattctatcggactggccatcgggactaatagcgtcgggtgggccgtgatcactgacgagtacaaggtgccctctaagaagttcaaggtgctcgggaacaccgaccggcattccatcaagaaaaatctgatcggagctctcctctttgattcaggggagaccgctgaagcaacccgcctcaagcggactgctagacggcggtacaccaggaggaagaaccggatttgttaccttcaagagatattctccaacgaaatggcaaaggtcgacgacagcttcttccataggctggaagaatcattcctcgtggaagaggataagaagcatgaacggcatcccatcttcggtaatatcgtcgacgaggtggcctatcacgagaaatacccaaccatctaccatcttcgcaaaaagctggtggactcaaccgacaaggcagacctccggcttatctacctggccctggcccacatgatcaagttcagaggccacttcctgatcgagggcgacctcaatcctgacaatagcgatgtggataaactgttcatccagctggtgcagacttacaaccagctctttgaagagaaccccatcaatgcaagcggagtcgatgccaaggccattctgtcagcccggctgtcaaagagccgcagacttgagaatcttatcgctcagctgccgggtgaaaagaaaaatggactgttcgggaacctgattgctctttcacttgggctgactcccaatttcaagtctaatttcgacctggcagaggatgccaagctgcaactgtccaaggacacctatgatgacgatctcgacaacctcctggcccagatcggtgaccaatacgccgaccttttccttgctgctaagaatctttctgacgccatcctgctgtctgacattctccgcgtgaacactgaaatcaccaaggcccctctttcagcttcaatgattaagcggtatgatgagcaccaccaggacctgaccctgcttaaggcactcgtccggcagcagcttccggagaagtacaaggaaatcttctttgaccagtcaaagaatggatacgccggctacatcgacggaggtgcctcccaagaggaattttataagtttatcaaacctatccttgagaagatggacggcaccgaagagctcctcgtgaaactgaatcgggaggatctgctgcggaagcagcgcactttcgacaatgggagcattccccaccagatccatcttggggagcttcacgccatccttcggcgccaagaggacttctacccctttcttaaggacaacagggagaagattgagaaaattctcactttccgcatcccctactacgtgggacccctcgccagaggaaatagccggtttgcttggatgaccagaaagtcagaagaaactatcactccctggaacttcgaagaggtggtggacaagggagccagcgctcagtcattcatcgaacggatgactaacttcgataagaacctccccaatgagaaggtcctgccgaaacattccctgctctacgagtactttaccgtgtacaacgagctgaccaaggtgaaatatgtcaccgaagggatgaggaagcccgcattcctgtcaggcgaacaaaagaaggcaattgtggaccttctgttcaagaccaatagaaaggtgaccgtgaagcagctgaaggaggactatttcaagaaaattgaatgcttcgactctgtggagattagcggggtcgaagatcggttcaacgcaagcctgggtacctaccatgatctgcttaagatcatcaaggacaaggattttctggacaatgaggagaacgaggacatccttgaggacattgtcctgactctcactctgttcgaggaccgggaaatgatcgaggagaggcttaagacctacgcccatctgttcgacgataaagtgatgaagcaacttaaacggagaagatataccggatggggacgccttagccgcaaactcatcaacggaatccgggacaaacagagcggaaagaccattcttgatttccttaagagcgacggattcgctaatcgcaacttcatgcaacttatccatgatgattccctgacctttaaggaggacatccagaaggcccaagtgtctggacaaggtgactcactgcacgagcatatcgcaaatctggctggttcacccgctattaagaagggtattctccagaccgtgaaagtcgtggacgagctggtcaaggtgatgggtcgccataaaccagagaacattgtcatcgagatggccagggaaaaccagactacccagaagggacagaagaacagcagggagcggatgaaaagaattgaggaagggattaaggagctcgggtcacagatccttaaagagcacccggtggaaaacacccagcttcagaatgagaagctctatctgtactaccttcaaaatggacgcgatatgtatgtggaccaagagcttgatatcaacaggctctcagactacgacgtggacgccatcgtccctcagagcttcctcaaagacgactcaattgacaataaggtgctgactcgctcagacaagaaccggggaaagtcagataacgtgccctcagaggaagtcgtgaaaaagatgaagaactattggcgccagcttctgaacgcaaagctgatcactcagcggaagttcgacaatctcactaaggctgagaggggcggactgagcgaactggacaaagcaggattcattaaacggcaacttgtggagactcggcagattactaaacatgtcgcccaaatccttgactcacgcatgaataccaagtacgacgaaaacgacaaacttatccgcgaggtgaaggtgattaccctgaagtccaagctggtcagcgatttcagaaaggactttcaattctacaaagtgcgggagatcaataactatcatcatgctcatgacgcatatctgaatgccgtggtgggaaccgccctgatcaagaagtacccaaagctggaaagcgagttcgtgtacggagactacaaggtctacgacgtgcgcaagatgattgccaaatctgagcaggagatcggaaaggccaccgcaaagtacttcttctacagcaacatcatgaatttcttcaagaccgaaatcacccttgcaaacggtgagatccggaagaggccgctcatcgagactaatggggagactggcgaaatcgtgtgggacaagggcagagatttcgctaccgtgcgcaaagtgctttctatgcctcaagtgaacatcgtgaagaaaaccgaggtgcaaaccggaggcttttctaaggaatcaatcctccccaagcgcaactccgacaagctcattgcaaggaagaaggattgggaccctaagaagtacggcggattcgattcaccaactgtggcttattctgtcctggtcgtggctaaggtggaaaaaggaaagtctaagaagctcaagagcgtgaaggaactgctgggtatcaccattatggagcgcagctccttcgagaagaacccaattgactttctcgaagccaaaggttacaaggaagtcaagaaggaccttatcatcaagctcccaaagtatagcctgttcgaactggagaatgggcggaagcggatgctcgcctccgctggcgaacttcagaagggtaatgagctggctctcccctccaagtacgtgaatttcctctaccttgcaagccattacgagaagctgaaggggagccccgaggacaacgagcaaaagcaactgtttgtggagcagcataagcattatctggacgagatcattgagcagatttccgagttttctaaacgcgtcattctcgctgatgccaacctcgataaagtccttagcgcatacaataagcacagagacaaaccaattcgggagcaggctgagaatatcatccacctgttcaccctcaccaatcttggtgcccctgccgcattcaagtacttcgacaccaccatcgaccggaaacgctatacctccaccaaagaagtgctggacgccaccctcatccaccagagcatcaccggactttacgaaactcggattgacctctcacagctcggaggggatgcctatccctatgacgtgcccgattatgccagcctgggcagcggctcccccaagaaaaaacgcaaggtggaagatcctaagaaaaagcggaaagtggacggcattggtagtgggagcaacggcagcagcggatccagcgagctgattaaggagaacatgcacatgaagctgtacatggagggcaccgtggacaaccatcacttcaagtgcacatccgagggcgaaggcaagccctacgagggcacccagaccatgagaatcaaggtggtcgagggcggccctctccccttcgccttcgacatcctggctactagcttcctctacggcagcaagaccttcatcaaccacacccagggcatccccgacttcttcaagcagtccttccctgagggcttcacatgggagagagtcaccacatacgaagacgggggcgtgctgaccgctacccaggacaccagcctccaggacggctgcctcatctacaacgtcaagatcagaggggtgaacttcacatccaacggccctgtgatgcagaagaaaacactcggctgggaggccttcaccgagacgctgtaccccgctgacggcggcctggaaggcagaaacgacatggccctgaagctcgtgggcgggagccatctgatcgcaaacatcaagaccacatatagatccaagaaacccgctaagaacctcaagatgcctggcgtctactatgtggactacagactggaaagaatcaaggaggccaacaacgagacctacgtcgagcagcacgaggtggcagtggccagatactgcgacctccctagcaaactggggcacaagcttaatggcggtggcggagggatggatgctaagtcactaactgcctggtcccggacactggtgaccttcaaggatgtatttgtggacttcaccagggaggagtggaagctgctggacactgctcagcagatcgtgtacagaaatgtgatgctggagaactataagaacctggtttccttgggttatcagcttactaagccagatgtgatcctccggttggagaagggagaagagccctagtaa

SEQ ID NO: 1341 - DNA, 7044 bp, Artificial Sequence
  Description of Artificial Sequence: Synthetic polynucleotide
atgaaccatgaccaggaatttgaccccccaaaggtttacccacctgtgccagctgagaagaggaagcccatccgcgtgctgtctctctttgatgggattgctacagggctcctggtgctgaaggacctgggcatccaagtggaccgctacattgcctccgaggtgtgtgaggactccatcacggtgggcatggtgcggcaccagggaaagatcatgtacgtcggggacgtccgcagcgtcacacagaagcatatccaggagtggggcccattcgacctggtgattggaggcagtccctgcaatgacctctccattgtcaaccctgcccgcaagggactttatgagggtactggccgcctcttctttgagttctaccgcctcctgcatgatgcgcggcccaaggagggagatgatcgccccttcttctggctctttgagaatgtggtggccatgggcgttagtgacaagagggacatctcgcgatttcttgagtctaaccccgtgatgattgacgccaaagaagtgtctgctgcacacagggcccgttacttctggggtaaccttcctggcatgaacaggcctttggcatccactgtgaatgataagctggagctgcaagagtgtctggagcacggcagaatagccaagttcagcaaagtgaggaccattaccaccaggtcaaactctataaagcagggcaaagaccagcatttccccgtcttcatgaacgagaaggaggacatcctgtggtgcactgaaatggaaagggtgtttggcttccccgtccactacacagacgtctccaacatgagccgcttggcgaggcagagactgctgggccgatcgtggagcgtgccggtcatccgccacctcttcgctccgctgaaggaatattttgcttgtgtgtctagcggcaatagtaacgctaacagccgcgggccgagcttcagcagcggcctggtgccgttaagcttgcgcggcagccatatgggccctatggagatatacaagacagtgtctgcatggaagagacagccagtgcgggtactgagcctcttcagaaacatcgacaaggtactaaagagtttgggcttcttggaaagcggttctggttctgggggaggaacgctgaagtacgtggaagatgtcacaaatgtcgtgaggagagacgtggagaaatggggcccctttgacctggtgtacggctcgacgcagcccctaggcagctcttgtgatcgctgtcccggctggtacatgttccagttccaccggatcctgcagtatgcgctgcctcgccaggagagtcagcggcccttcttctggatattcatggacaatctgctgctgactgaggatgaccaagagacaactacccgcttccttcagacagaggctgtgaccctccaggatgtccgtggcagagactaccagaatgctatgcgggtgtggagcaacattccagggctgaagagcaagcatgcgcccctgaccccaaaggaagaagagtatctgcaagcccaagtcagaagcaggagcaagctggacgccccgaaagttgacctcctggtgaagaactgccttctcccgctgagagagtacttcaagtatttttctcaaaactcacttcctcttggagggccgagctctggcgcacccccaccaagtggagggtctcctgccgggtccccaacatctactgaagaaggcaccagcgaatccgcaacgcccgagtcaggccctggtacctccacagaaccatctgaaggtagtgcgcctggttccccagctggaagccctacttccaccgaagaaggcacgtcaaccgaaccaagtgaaggatctgcccctgggaccagcactgaaccatctgagatggacaagaagtacagcatcggcctggccatcggcaccaactctgtgggctgggccgtgatcaccgacgagtacaaggtgcccagcaagaaattcaaggtgctgggcaacaccgaccggcacagcatcaagaagaacctgatcggagccctgctgttcgacagcggcgaaacagccgaggccacccggctgaagagaaccgccagaagaagatacaccagacggaagaaccggatctgctatctgcaagagatcttcagcaacgagatggccaaggtggacgacagcttcttccacagactggaagagtccttcctggtggaagaggataagaagcacgagcggcaccccatcttcggcaacatcgtggacgaggtggcctaccacgagaagtaccccaccatctaccacctgagaaagaaactggtggacagcaccgacaaggccgacctgcggctgatctatctggccctggcccacatgatcaagttccggggccacttcctgatcgagggcgacctgaaccccgacaacagcgacgtggacaagctgttcatccagctggtgcagacctacaaccagctgttcgaggaaaaccccatcaacgccagcggcgtggacgccaaggccatcctgtctgccagactgagcaagagcagacggctggaaaatctgatcgcccagctgcccggcgagaagaagaatggcctgttcggaaacctgattgccctgagcctgggcctgacccccaacttcaagagcaacttcgacctggccgaggatgccaaactgcagctgagcaaggacacctacgacgacgacctggacaacctgctggcccagatcggcgaccagcaggccgacctgtttctggccgccaagaacctgtccgacgccatcctgctgagcgacatcctgagagtgaacaccgagatcaccaaggcccccctgagcgcctctatgatcaagagatacgacgagcaccaccaggacctgaccctgctgaaagctctcgtgcggcagcagctgcctgagaagtacaaagagattttcttcgaccagagcaagaacggctacgccggctacattgacggcggagccagccaggaagagttctacaagttcatcaagcccatcctggaaaagatggacggcaccgaggaactgctcgtgaagctgaacagagaggacctgctgcggaagcagcggaccttcgacaacggcagcatcccccaccagatccacctgggagagctgcacgccattctgcggcggcaggaagatttttacccattcctgaaggacaaccgggaaaagatcgagaagatcctgaccttccgcatcccctactacgtgggccctctggccaggggaaacagcagattcgcctggatgaccagaaagagcgaggaaaccatcaccccctggaacttcgaggaagtggtggacaagggcgcttccgcccagagcttcatcgagcggatgaccaacttcgataagaacctgcccaacgagaaggtgctgcccaagcacagcctgacctacgagtacttcaccgtgtataacgagctgaccaaagtgaaatacgtgaccgagggaatgagaaagcccgccttcctgagcggcgagcagaaaaaggccatcgtggacctgctgttcaagaccaaccggaaagtgaccgtgaagcagctgaaagaggactacttcaagaaaatcgagtgcttcgactccgtggaaatctccggcgtggaagatcggttcaacgcctccctgggcacataccacgatctgctgaaaattatcaaggacaaggacttcctggacaatgaggaaaacgaggacattctggaagatatcgtgctgacccagacactgtttgaggacagagagatgatcgaggaacggctgaaaacctatgcccacctgttcgacgacaaagtgatgaagcagctgaagcggcggagatacaccggctggggcaggctgagccggaagctgatcaacggcatccgggacaagcagtccggcaagacaatcctggatttcctgaagtccgacggcttcgccaacagaaacttcatgcagctgatccacgacgacagcctgacctttaaagaggacatccagaaagcccaggtgtccggccagggcgatagcctgcacgagcacattgccaatggagccggcagccccgccattaagaagggcatcctgcagacagtgaaggtggtggacgagctcgtgaaagtgatgggccggcacaagcccgagaacatcgtgatcgaaatggccagagagaaccagaccacccagaagggacagaagaacagccgcgagagaatgaagcggatcgaagagggcatcaaagagctgggcagccagatcctgaaagaacaccccgtggaaaacacccagctgcagaacgagaagctgtacctgtactacgaccagaatgggcgggatatgtacgtggaccaggaactggacatcaaccggctgtccgactacgatgtggacgcaatcgtgcctcagagctttctgaaggacgactccatcgacaacaaggtgctgaccagaagcgacaagaaccggggcaagagcgacaacgtgccctccgaagaggtcgtgaagaagatgaagaactactggcggcagctgctgaacgccaagctgattacccagagaaagttcgacaatctgaccaaggccgagagaggcggcctgagcgaactggataaggccggcttcatcaagagacagctggtggaaacccggcagatcacaaagcacgtggcacagatcctggactcccggatgaacactaagtacgacgagaatgacaagctgatccgggaagtgaaagtgatcaccctgaagtccaagctggtgtccgatttccggaaggatttccagttttacaaagtgcgcgagatcaacaactaccaccacgcccacgacgcctacctgaacgccgtcgtgggaaccgccctgatcaaaaagtaccctaagctggaaagcgagttcgtgtacggcgactacaaggtgtacgacgtgcggaagatgatcgccaagagcgagcaggaaatcggcaaggctaccgccaagtacttcttctacagcaacatcatgaactttttcaagaccgagattaccctggccaacggcgagatccggaagcggcctctgatcgagacaaacggcgaaaccggggagatcgtgtgggataagggccgggattttgccaccgtgcggaaagtgctgagcatgccccaagtgaatatcgtgaaaaagaccgaggtgcagacaggcggcttcagcaaagagtctatcctgcccaagaggaacagcgataagctgatcgccagaaagaaggactgggaccctaagaagtacggcggcttcgacagccccaccgtggcctattctgtgctggtggtggccaaagtggaaaagggcaagtccaagaaactgaagagtgtgaaagagctgctggggatcaccatcatggaaagaagcagcttcgagaagaatcccatcgactttctggaagccaagggctacaaagaagtgaaaaaggacctgatcatcaagctgcctaagtactccctgttcgagctggaaaacggccggaagagaatgctggcctctgccggcgaactgcagaagggaaacgaactggccctgccctccaaatatgtgaacttcctgtacctggccagccactatgagaagggaaagggctcccccgaggataatgagcagaaacagctgtttgtggaacagcacaagcactacctggacgagatcatcgagcagatcagcgagttctccaagagagtgatcgctgccgacgctaatctggacaaagtgctgtccgcctacaacaagcaccgggataagcccatcagagagcaggccgagaatatcatccacctgtttaccctgaccaatctgggagcccctgccgccttcaagtactttgacaccaccatcgaccggaagaggtacaccagcaccaaagaggtgctggacgccaccctgatccaccagagcatcaccggcctgtacgagacacggatcgacctgtctcagctgggaggcgacgcctatccctatgacgtgcccgattatgccagcctgggcagcggctcccccaagaaaaaacgcaaggtggaagatcctaagaaaaagcggaaagtggacggcattggtagtgggagcaacggcagcagcggatccagcgagctgattaaggagaacatgcacatgaagctgtacatggagggcaccgtggacaaccatcacttcaagtgcacatccgagggcgaaggcaagccctacgagggcacccagaccatgagaatcaaggtggtcgagggcggccctctccccttcgccttcgacatcctggctactagcttcctctacggcagcaagaccttcatcaaccacacccagggcatccccgacttcttcaagcagtccttccctgagggcttcacatgggagagagtcaccacatacgaagacgggggcgtgctgaccgctacccaggacaccagcctccaggacggctgcctcatctacaacgtcaagatcagaggggtgaacttcacatccaacggccctgtgatgcagaagaaaacactcggctgggaggccttcaccgagacgctgtaccccgctgacggcggcctggaaggcagaaacgacatggccctgaagctcgtgggcgggagccatctgatcgcaaacatcaagaccacatatagatccaagaaacccgctaagaacctcaagatgcctggcgtctactatgtggactacagactggaaagaatcaaggaggccaacaacgagacctacgtcgagcagcacgaggtggcagtggccagatactgcgacctccctagcaaactggggcacaagcttaatggcggtggcggagggatggatgctaagtcactaactgcctggtcccggacactggtgaccttcaaggatgtatttgtggacttcaccagggaggagtggaagctgctggacactgctcagcagatcgtgtacagaaatgtgatgctggagaactataagaacctggtttccttgggttatcagcttactaagccagatgtgatcctccggttggagaagggagaagagccctagtaa

SEQ ID NO: 1342 - DNA, 3813 bp, Artificial Sequence
  Description of Artificial Sequence: Synthetic polynucleotide
atgttcgtgttcctggtgctgctgcccctggtaagctcacagtgcgtgaacctgaccacaagaacacagctgcctcctgcttacaccaacagcttcacaaggggcgtgtactaccctgataaagtgttcagaagcagcgtgctgcacagcacacaggacctgtttctccctttcttcagcaacgtgacctggttccacgtgatcagcggcactaacggcaccaagagatttgacaaccctgtgctgccttttaacgacggcgtttacttcgccagtatcgagaagagcaacatcatacggggatggatcttcggcaccaccctggatagcaagacccagagcctgctgatcgttaacaacgccaccaacgtcgtgatcaaggtgtgcgagttccagttttgcaatgatcccttcctggaccacaagaacaacaagagctggatggaatccgagttcagagtgtacagctccgccaataactgcacattcgagtacgtctcacagccctttctgatggacctggaaggcaagcagggcaacttcaagaaccttagagagttcgtgtttaagaacatcgatgggtacttcaaaatctactctaagcacacccctatcatcgtgcgggagcctgaggacctgccacagggcttttctgccctggaacctctggtcgatctgcccatcggaatcaacatcacaagattccagactctgctggctttgcacagaagctacctgacccccggcgacagcagcagcggctggaccgctggcgctgcggcgtactacgtgggctacctgcaacctagaacgttcctgctgaagtacaatgagaacggcacaatcacagacgccgtggactgtgccctggaccccctgtctgaaaccaagtgtacactgaagagcttcaccgtggagaagggcatttaccagacatctaattttcgggtgcagcctaccgagtcgatcgtgcggttcccgaacattacaaacctgtgccccttcgacgaggtgtttaacgccacccgcttcgccagcgtgtacgcctggaacagaaagagaatcagcaactgcgtagctgattactccgtgctgtacaacctggccccatttttcaccttcaagtgctacggagtgagcccaaccaagctgaatgacctttgtttcactaacgtgtacgctgactccttcgtgatcagaggcgacgaagtgcggcagatcgcacctggccagacaggcaacatcgccgactacaactacaaactgccagatgacttcaccggctgtgtgatcgcgtggaatagtaacaagctggattccaaagtgtccggaaactataactacctgtaccgactgttccggaagagcaatctgaagcccttcgagagagacatcagcaccgaaatctaccaggccggaaataaaccttgtaacggcgttgctggatttaactgctactttcctctgaggagctacagctttagacccacatacggcgttggccaccagccctaccgggtggtggtgctgagcttcgaactgctgcatgcccctgctacagtgtgcggccctaagaaatcgaccaacctggtgaagaacaagtgcgtgaactttaacttcaacggtctgaagggcacaggcgtgctgaccgagagcaacaaaaagttcctgccattccaacagttcggcagagacatcgccgacaccaccgacgcagtgcgggacccgcaaaccttggaaatcctggacattaccccttgcagctttggcggcgtcagcgtcatcacacctggcacaaacaccagcaatcaggtggccgtgctgtaccagggcgtgaactgtaccgaggtgcctgtagccatccacgccgaccagctgacccccacatggagggtgtacagcacaggcagcaacgtattccagaccagagccggctgtctgatcggtgctgaatacgtgaacaattcctacgagtgcgacatccctatcggcgccggcatctgcgccagctaccaaacccagaccaagagccacagaagagccagaagtgttgccagccagagcatcatcgcctatacgatgagcctgggcgcagaaaacagcgtggcctacagcaacaactctatcgccatccctacaaactttaccatctctgttaccactgagatcctgcccgtaagcatgaccaagacctctgtggattgtaccatgtacatctgcggagattctaccgaatgtagcaacctgctgctgcaatacggcagcttttgcacacagctaaagcgggctctgaccggaattgccgtggaacaggacaagaacacccaggaggtgttcgcccaagtgaaacaaatctacaagacacctccaatcaagtacttcggcggttttaatttcagccaaattctgcctgacccatctaagcctagcaaacggagcttcatcgaggacctactgttcaacaaggtgaccctggccgatgccggcttcatcaagcagtacggcgactgcctgggcgacatcgccgctagagacctgatctgtgcccaaaaattcaaaggactgaccgtgctgcctcctctgctgacggatgaaatgatcgcccagtacacaagcgccctgctggccggcacaatcaccagcggctggaccttcggggccggcgccgccctgcaaatccctttcgccatgcagatggcctatcggttcaacggcattggcgttacccagaacgtcctgtacgagaaccagaaactgatcgccaaccagttcaactctgccatcggcaagatccaggactctctgagcagcacagccagcgccctcggaaagctccaagacgtggttaatcacaacgcccaggccctgaataccctggtgaagcagctgagcagcaagttcggcgccatctcatctgtcctgaacgacatcttcagcagactggatcctccagaggccgaggtgcagatcgacagactgatcaccggaagactgcaaagcctccagacctacgtgacacagcagctgatcagagccgctgaaatcagagcctctgctaatttggccgccacaaagatgagcgagtgcgtgctgggccaaagcaaacgggtggacttctgcggcaagggataccacctgatgagcttccctcagagcgctcctcacggcgtggtgttcctgcacgtgacctacgtgcccgcccaggagaagaacttcaccaccgcccctgccatctgccacgacggcaaggcccacttcccccgggagggcgtgttcgtgtccaatggaacacactggttcgtgacccagagaaacttctacgaacctcagatcatcaccacggacaacaccttcgtgtctggcaactgcgatgtggtgataggcatcgtgaacaacaccgtatacgaccctctgcaacctgagctggacagttttaaagaggaactggacaaatacttcaagaatcataccagccccgatgtggatctgggcgacatcagcggcatcaacgcctctgtcgtgaatatccagaaggaaatcgatcgcctgaacgaggtggccaagaatctgaacgagagcctgatcgatctccaggagctgggaaagtacgagcagtatatcaagtggccttggtacatctggctgggtttcatcgccggcctgatcgccatcgtgatggtgaccatcatgctgtgctgcatgacctcctgttgtagctgcctgaagggctgctgtagctgcggcagttgctgtaaattcgacgaggatgattccgagcccgtgctgaagggcgttaagctgcactacacataa

SEQ ID NO: 1343 - skipped

SEQ ID NO: 1344 - DNA, 20 bp, Artificial Sequence
  Description of Artificial Sequence: Synthetic oligonucleotide
ggctgatgaggccgcacatg

SEQ ID NO: 1345 - DNA, 20 bp, Artificial Sequence
  Description of Artificial Sequence: Synthetic oligonucleotide
ggggccactagggacaggat

SEQ ID NO: 1346 - DNA, 20 bp, Artificial Sequence
  Description of Artificial Sequence: Synthetic oligonucleotide
agggtaggagagactcacgc

SEQ ID NO: 1347 - DNA, 44 bp, Artificial Sequence
  Description of Artificial Sequence: Synthetic oligonucleotide
ctgccatcagtcggcatggttctacagtccacgccgactgatgg

SEQ ID NO: 1348 - DNA, 85 bp, Artificial Sequence
  Description of Artificial Sequence: Synthetic oligonucleotide
gaattcgcgcgcgcgccgtatctgtcgagtagagtgtgggctcctgccatcagtcggcgtggactgtagaaccatgccgactgat

SEQ ID NO: 1349 - DNA, 50 bp, Artificial Sequence
  Description of Artificial Sequence: Synthetic oligonucleotide
gtgtgggctcctgccatcagtcggcgtggactgtagaaccatgccgactg

SEQ ID NO: 1350 - DNA, 60 bp, Artificial Sequence
  Description of Artificial Sequence: Synthetic oligonucleotide
acgacttcttcaagtccgccatgcccgaaggctacgtccaggagcgcaccatcttcttca

SEQ ID NO: 1351 - DNA, 110 bp, Artificial Sequence
  Description of Artificial Sequence: Synthetic polynucleotide
gccaaacaatcctcgaaccaaacaatcctcgaaccaaacaatcctcgaaccaaacaatcctcgaaccaaacaatcctcgaaccaaacaatcctcgaaccaaacaacacag

SEQ ID NO: 1352 - DNA, 91 bp, Artificial Sequence
  Description of Artificial Sequence: Synthetic oligonucleotide
gtaagtatcaaggttacaagacaggtttaaggagaccaatagaaactgggcttgtcgagacagagaagactcttgcgtttctgataggcac

SEQ ID NO: 1353 - DNA, 42 bp, Artificial Sequence
  Description of Artificial Sequence: Synthetic oligonucleotide
ctattggtcttactgacatccactttgcctttctctccacag

SEQ ID NO: 1354 - DNA, 56 bp, Artificial Sequence
  Description of Artificial Sequence: Synthetic oligonucleotide
gccatcagtcgccggtcccaagcccggataaaatgggagggggcgggaaaccgcct

SEQ ID NO: 1355 - DNA, 55 bp, Artificial Sequence
  Description of Artificial Sequence: Synthetic oligonucleotide
aacactgccaatgccggtcccaagcccggataaaagtggagggtacagtccacgc

SEQ ID NO: 1356 - DNA, 21 bp, Artificial Sequence
  Description of Artificial Sequence: Synthetic oligonucleotide
aaccatgccgactgatggcag

SEQ ID NO: 1357 - DNA, 26 bp, Artificial Sequence
  Description of Artificial Sequence: Synthetic oligonucleotide
ctgccatcagtcggcgtggactgtag

SEQ ID NO: 1358 - DNA, 625 bp, Artificial Sequence
  Description of Artificial Sequence: Synthetic polynucleotide
gcggccgcgtcgacgggcccgcggaattccgccccccccccctctccctcccccccccctaacgttactggccgaagccgcttggaataaggccggtgtgcgtttgtctatatgttattttccaccatattgccgtcttttggcaatgtgagggcccggaaacctggccctgtcttcttgacgagcattcctaggggtctttcccctctcgccaaaggaatgcaaggtctgttgaatgtcgtgaaggaagcagttcctctggaagcttcttgaagacaaacaacgtctgtagcgaccctttgcaggcagcggaaccccccacctggcgacaggtgcctctgcggccaaaagccacgtgtataagatacacctgcaaaggcggcacaaccccagtgccacgttgtgagttggatagttgtggaaagagtcaaatggctctcctcaagcgtattcaacaaggggctgaaggatgcccagaaggtaccccattgtatgggatctgatctggggcctcggtgcacatgctttacatgtgtttagtcgaggttaaaaaaacgtctaggccccccgaaccacggggacgtggttttcctttgaaaaacacgatgataatatggccacaacc

SEQ ID NO: 1359 - DNA, 44 bp, Artificial Sequence
  Description of Artificial Sequence: Synthetic oligonucleotide
  modified_base (44)..(44): a, c, t, g, unknown or other
ctgccatcagtcggcatggttctacagtccacgccgactgatgn

SEQ ID NO: 1360 - DNA, 50 bp, Artificial Sequence
  Description of Artificial Sequence: Synthetic oligonucleotide
  modified_base (36)..(36): a, c, t, g, unknown or other
gtgtgggctcctgccatcagtcggcgtggactgtanaaccatgccgactg

1. A ribozyme activated RNA-construct(s) comprising:
one or more ribozymes; and
one or more RNA coding sequences for at least one polypeptide of interest;
wherein the transcription of the one or more RNA coding sequences for at least one polypeptide of interest is activated by or dependent upon the activity of the one or more ribozymes.

2. The ribozyme activated RNA-construct(s) of claim 1, further comprising:
a first engineered RNA element comprising an optional primer region, an optional barcode region, an RNA coding sequence for a polypeptide of interest and a complementary sequence to a sequence of a second engineered RNA element, and a first self-cleaving ribozyme;
a second engineered RNA element comprising an optional primer region, an optional barcode region, an RNA coding sequence for a polypeptide of interest and a complementary sequence to a sequence of the first engineered RNA element, and a second self-cleaving ribozyme;
wherein cleavage of the first and second engineered RNA elements by the first and second self-cleaving ribozymes, respectively, provides for a hybridization construct that comprises a region of dsRNA from the commentary sequences being hybridized together,
wherein the hybridization construct can be further ligated by an RNA ligase to form an RNA-fusion construct, and
wherein expression from the RNA-fusion construct produces the at least one polypeptide of interest.

3. The ribozyme activated RNA-construct(s) of claim 2, wherein the first engineered RNA element comprises a barcode sequence or a unique molecular identity (UMI) sequence and/or wherein the second engineered RNA element comprises a barcode sequence or a UMI sequence.

4. The ribozyme activated RNA-construct(s) of claim 3, wherein the barcode sequence or the UMI sequence of the first engineered element has a different sequence than the barcode region or the UMI sequence from the second engineered RNA element.

5. The ribozyme activated RNA-construct(s) of claim 2, wherein the first engineered RNA element comprises a primer sequence, and/or wherein the second engineered RNA element comprises a primer sequence.

6. The ribozyme activated RNA-construct(s) of claim 5, wherein the primer sequence of the first engineered RNA element is different from the primer sequence from the second engineered RNA element.

7. The ribozyme activated RNA-construct(s) of claim 2, wherein the first and second complementary sequences are from 30 to 60 bp in length.

8. (canceled)

9. The ribozyme activated RNA-construct(s) of claim 2, wherein the first and second ribozymes are Twister ribozymes.

10. The ribozyme activated RNA-construct(s) of claim 9, wherein the first ribozyme is a P3 Twister ribozyme.

11. The ribozyme activated RNA-construct(s) of claim 10, wherein the second ribozyme is a P1 Twister ribozyme.

12. The ribozyme activated RNA-construct(s) of claim 2, wherein the RNA ligase is RtcB.

13. The ribozyme activated RNA-construct(s) of claim 2, wherein a vector or plasmid comprises the first engineered element, wherein the first engineered element is located downstream of a first RNA promoter and a first perturbation element; and/or wherein a vector or plasmid comprises the second engineered element, wherein the second engineered element is located downstream of a second RNA promoter and a second perturbation element.

14. The ribozyme activated RNA-construct(s) of claim 13, wherein the first RNA promoter and/or the second RNA promoter is a polymerase III promoter.

15. (canceled)

16. The ribozyme activated RNA-construct(s) of claim 13, wherein the first perturbation element and/or the second perturbation element is a sgRNA utilized in a CRISPR knockout screen.

17. (canceled)

18. The ribozyme activated RNA-construct(s) of claim 1, comprising:
a first engineered RNA element comprising an RNA coding sequence for a polypeptide of interest, an intron sequence, a complementary sequence to a sequence of a second engineered RNA element and a 3′ aptamer, and a first self-cleaving ribozyme, and wherein the 3′ aptamer interacts with a first self-cleaving ribozyme to stabilize it;
a second engineered RNA element comprising an RNA coding sequence for a polypeptide of interest, an intron sequence, a complementary sequence to a sequence of the first engineered RNA element, and a 3′ aptamer, wherein the second engineered RNA template is tethered to a second self-cleaving ribozyme, and wherein the 3′ aptamer interacts with a second self-cleaving ribozyme to stabilize it;
wherein cleavage of the first and second engineered RNA elements by the first and second self-cleaving ribozymes, respectively, provides for a hybridization construct that comprises a region of dsRNA from the commentary sequences being hybridized together, and
wherein the hybridization construct can be further ligated by an RNA ligase and the intron sequences removed by a spliceosome to form an RNA-fusion construct,
wherein expression from the RNA-fusion construct produces the at least one polypeptide of interest.

19. The ribozyme activated RNA-construct(s) of claim 18, wherein the intron sequence is derived from dihydrofolate reductase.

20. The ribozyme activated RNA-construct(s) of claim 18, wherein the RNA coding sequences for a polypeptide of interest are adjacent to each of the intron sequences.

21. The ribozyme activated RNA-construct(s) of claim 18, wherein the RNA coding sequences for a polypeptide of interest encode a polypeptide/protein selected from insulin, clotting factor IX, the cystic fibrosis transmembrane conductance regulator protein, and the dystrophin protein.

22. A pharmaceutical composition comprising the ribozyme activated RNA-construct(s) of claim 1, wherein the ribozyme activated RNA-construct(s) is linearized and comprises:
a 5′ ribozyme;
a 5′ ligation sequence;
an internal ribosome entry site (IRES) sequence;
an RNA coding sequence for at least one polypeptide of interest;
a 3′ ligation sequence; and
a 3′ ribozyme sequence, and
a pharmaceutically acceptable carrier.

23. The pharmaceutical composition of claim 22, wherein the linear ribozyme activated RNA-construct(s) lacks a polymerase binding region.

24. The pharmaceutical composition of claim 22, wherein the 5′ and 3′ ribozymes are selected from the group consisting of a twister ribozyme, a hammerhead ribozyme, a hatchet ribozyme, a hepatitis delta virus ribozyme, a ligase ribozyme, a pistol ribozyme, a twister sister ribozyme, a Vg1 ribozyme, a VS ribozyme and derivatives of any of the foregoing.

25. The pharmaceutical composition of claim 22, wherein the 5′ and 3′ ligation sequences are substrates of naturally occurring ligases in situ.

26. The pharmaceutical composition of claim 25, wherein the naturally occurring ligase is RtcB.

27. The pharmaceutical composition of claim 22, wherein the IRES comprises any one of the sequences of SEQ ID NO:1-1328.

28. The pharmaceutical composition of claim 22, wherein the at least one polypeptide of interest comprises two or more polypeptides of interest separated by a self-cleaving peptide.

29. The pharmaceutical composition of claim 28, wherein the self-cleaving peptide comprises a 2A- or 2A-like-peptide.

30. The pharmaceutical composition of claim 22, wherein the at least one polypeptide of interest is selected from the group consisting of a prodrug activating enzyme, a biological response modifier, a receptor ligand, an immunoglobulin derived binding polypeptide, a non-immunoglobulin binding polypeptide, an antigenic polypeptide, a genome editing enzyme, and any combination thereof wherein multiple polypeptides are separated by a 2A or 2A-like peptide.

31. The pharmaceutical composition of claim 30, wherein the biological response modifier is an immunopotentiating cytokine.

32. The pharmaceutical composition of claim 31, wherein the immunopotentiating cytokine is selected from the group consisting of interleukins 1 through 38, interferon, tumor necrosis factor (TNF), and granulocyte-macrophage-colony stimulating factor (GM-CSF).

33. The pharmaceutical composition of claim 29, wherein the 2A- or 2A-like peptide further comprises a GSG linker moiety.

34. The pharmaceutical composition of claim 30, wherein the genome editing enzyme is selected from the group consisting of a zinc finger nuclease, a transcription activator-like effector nuclease (TALEN), an engineered meganuclease and an RNA-guided DNA endonuclease (Cas) polypeptide.

35. The pharmaceutical composition of claim 22, wherein the 5′ and 3′ ribozyme sequences are independently selected from a sequence that is at least 85-100% identical to 5′-GCCATCAGTCGCCGGTCCCAAGCCCGGATAAAATGGGAGGGGGGGGAAACC GCCT-3′ (SEQ ID NO:1354) or 5′-AACACTGCCAATGCCGGTCCCAAGCCCGGATAAAAGTGGAGGGTACAGTCCAC GC-3′ (SEQ ID NO:1355).

36. The pharmaceutical composition of claim 22, wherein the 5′ and 3′ ligation sequences are independently selected from a sequence that is at least 85-100% identical to 5′-AACCATGCCGACTGATGGCAG-3′ (SEQ ID NO: 1356) or 5′-CTGCCATCAGTCGGCGTGGACTGTAG-3′ (SEQ ID NO: 1357).

37. The pharmaceutical composition of claim 22, wherein the IRES sequence is at least 85-100% identical to 5′-gcggccgcgtcgacgggcccgcggaattccgccccccccccctctccctcccccccccctaacgttactggccgaa gccgcttggaataaggccggtgtgcgtttgtctatatgttattttccaccatattgccgtcttttggcaatgtgagggcccgg aaacctggccctgtcttcttgacgagcattcctaggggtctttcccctctcgccaaaggaatgcaaggtctgttgaatgtc gtgaaggaagcagttcctctggaagcttcttgaagacaaacaacgtctgtagcgaccctttgcaggcagcggaaccc cccacctggcgacaggtgcctctgcggccaaaagccacgtgtataagatacacctgcaaaggcggcacaacccc agtgccacgttgtgagttggatagttgtggaaagagtcaaatggctctcctcaagcgtattcaacaaggggctgaagg atgcccagaaggtaccccattgtatgggatctgatctggggcctcggtgcacatgctttacatgtgtttagtcgaggttaa aaaaacgtctaggccccccgaaccacggggacgtggttttcctttgaaaaacacgatgataatatggccacaacc-3′ (SEQ ID NO:1358).

38. A vaccine composition comprising the ribozyme activated RNA-construct(s) of claim 1, wherein the ribozyme activated RNA-construct(s) is linearized and comprises:
a 5′ ribozyme;
a 5′ ligation sequence;
an internal ribosome entry site (IRES) sequence;
an RNA coding sequence for at least one antigenic polypeptide;
a 3′ ligation sequence; and
a 3′ ribozyme sequence, and
a pharmaceutically acceptable carrier.

39. The vaccine composition of claim 38, wherein the linearized ribozyme activated RNA-construct(s) lacks a polymerase binding region.

40. The vaccine composition of claim 38, wherein the 5′ and 3′ ribozyme is selected from the group consisting of a twister ribozyme, a hammerhead ribozyme, a hatchet ribozyme, a hepatitis delta virus ribozyme, a ligase ribozyme, a pistol ribozyme, a twister sister ribozyme, a Vg1 ribozyme, a VS ribozyme and derivatives of any of the foregoing.

41. The vaccine composition of claim 38, wherein the 5′ and 3′ ligation sequences are substrates of naturally occurring ligases in situ.

42. The vaccine composition of claim 41, wherein the naturally occurring ligase is RtcB.

43. The vaccine composition of claim 38, wherein the IRES comprises any one of the sequences of SEQ ID NO: 1-1328.

44. The vaccine composition of claim 38, wherein the at least one antigenic polypeptide comprises two or more antigenic polypeptides separated by a self-cleaving peptide.

45. The vaccine composition of claim 44, wherein the self-cleaving peptide comprises a 2A- or 2A-like-peptide.

46. The vaccine composition of claim 45, wherein the 2A- or 2A-like peptide further comprises a GSG linker moiety.

47. The vaccine composition of claim 38, wherein the 5′ and 3′ ribozyme sequences are independently selected from a sequence that is at least 85-100% identical to 5′-GCCATCAGTCGCCGGTCCCAAGCCCGGATAAAATGGGAGGGGGGGGGAAACC GCCT-3′ (SEQ ID NO:1354) or 5′-AACACTGCCAATGCCGGTCCCAAGCCCGGATAAAAGTGGAGGGTACAGTCCAC GC-3′ (SEQ ID NO:1355).

48. The vaccine composition of claim 38, wherein the 5′ and 3′ ligation sequences are independently selected from a sequence that is at least 85-100% identical to 5′-AACCATGCCGACTGATGGCAG-3′ (SEQ ID NO: 1356) or 5′-CTGCCATCAGTCGGCGTGGACTGTAG-3′ (SEQ ID NO: 1357).

49. The vaccine composition of claim 38, wherein the IRES sequence is at least 85-100% identical to 5′-gcggccgcgtcgacgggcccgcggaattccgccccccccccctctccctcccccccccctaacgttactggccgaa gccgcttggaataaggccggtgtgcgtttgtctatatgttattttccaccatattgccgtcttttggcaatgtgagggcccgg aaacctggccctgtcttcttgacgagcattcctaggggtctttcccctctcgccaaaggaatgcaaggtctgttgaatgtc gtgaaggaagcagttcctctggaagcttcttgaagacaaacaacgtctgtagcgaccctttgcaggcagcggaaccc cccacctggcgacaggtgcctctgcggccaaaagccacgtgtataagatacacctgcaaaggcggcacaacccc agtgccacgttgtgagttggatagttgtggaaagagtcaaatggctctcctcaagcgtattcaacaaggggctgaagg atgcccagaaggtaccccattgtatgggatctgatctggggcctcggtgcacatgctttacatgtgtttagtcgaggttaa aaaaacgtctaggccccccgaaccacggggacgtggttttcctttgaaaaacacgatgataatatggccacaacc-3′ (SEQ ID NO:1358).

50. The vaccine composition of claim 38, wherein the antigenic polypeptide comprises a SARS-COV-2 spike protein.

51. The vaccine composition of claim 38, wherein the at least one polypeptide of interest or antigenic polypeptide is contained within a self-amplifying RNA construct.

52. The vaccine composition of claim 51, wherein the self-amplifying RNA construct comprises an alphavirus or a Paramyxovirus.

53. The ribozyme activated RNA-construct(s) of claim 1, wherein the ribozyme activated RNA-construct(s) comprises:
one or more promoter sequences;
one or more RNA coding sequences for at least one polypeptide of interest;
one or more ribozymes, wherein the one or more ribozymes are aptazyme-based riboswitches;
a 3′ UTR sequence comprising the aptazyme-based riboswitches; and
a poly(A) sequence;
wherein the aptazyme-based riboswitches when not bound to target ligands destabilize the ribozyme activated RNA-construct(s) leading to decreased expression of the at least polypeptide of interest, and
wherein the aptazyme-based riboswitches when bound to target ligands stabilize the ribozyme activated RNA-construct(s) leading to increased expression of the at least polypeptide of interest.

54. The ribozyme activated RNA-construct(s) of claim 53, wherein the aptazyme-based riboswitches are hammerhead aptazymes.

55. The ribozyme activated RNA-construct(s) of claim 53, wherein the target ligands are selected from tetracycline, theophylline, and guanine.

56. The ribozyme activated RNA-construct(s) of claim 53, wherein the at least one polypeptide of interest is selected from the group consisting of a prodrug activating enzyme, a biological response modifier, a receptor ligand, an immunoglobulin derived binding polypeptide, a non-immunoglobulin binding polypeptide, an antigenic polypeptide, a genome editing enzyme, and any combination thereof wherein multiple polypeptides are separated by a 2A or 2A-like peptide.

57. The ribozyme activated RNA-construct(s) of claim 56, wherein the biological response modifier or an immunopotentiating cytokine.

58. The ribozyme activated RNA-construct(s) of claim 57, wherein the immunopotentiating cytokine is selected from the group consisting of interleukins 1 through 38, interferon, tumor necrosis factor (TNF), and granulocyte-macrophage-colony stimulating factor (GM-CSF).

59. The ribozyme activated RNA-construct(s) of claim 56, wherein the 2A- or 2A-like peptide further comprises a GSG linker moiety.

60. The ribozyme activated RNA-construct(s) of claim 56, wherein the genome editing enzyme is selected from the group consisting of a zinc finger nuclease, a transcription activator-like effector nuclease (TALEN), an engineered meganuclease and an RNA-guided DNA endonuclease (Cas) polypeptide.

61. The ribozyme activated RNA-construct(s) of claim 53, wherein the one or more promoter sequences are polymerase II (pol-II) promoter sequences.

62. The ribozyme activated RNA-construct(s) of claim 53, wherein the one or more promoter sequences have a sequence(s) for EF1α, hU6, SV40, CMV, a RSV, NEUROD2 and/or TBX20.

63. The ribozyme activated RNA-construct(s) of claim 53, wherein the poly(A) sequence is a bGH poly(A) sequence.

64. A plasmid or capsid comprising the ribozyme activated RNA-construct(s) of claim 53.

65. The plasmid or capsid of claim 64, wherein the plasmid or capsid is an AAV-based plasmid or capsid.

66. The plasmid or capsid of claim 64, wherein the plasmid expresses a Cas9 protein and a gRNA.
